(19) United States
(12) Patent Application Publication
(10) Pub. No.: US 2023/0324389 A1
(43) Pub. Date: Oct. 12, 2023

(54) COMPOSITIONS AND METHODS RELATED TO ACTIVATABLE THERAPEUTIC AGENTS

(71) Applicant: AMUNIX PHARMACEUTICALS, INC., Mountain View, CA (US)

(72) Inventors: Volker SCHELLENBERGER, Palo Alto, CA (US); Deena RENNERFELDT, Redwood City, CA (US); Angela HENKENSIEFKEN, San Jose, CA (US); Milton TO, San Leandro, CA (US)

(21) Appl. No.: 18/068,872

(22) Filed: Dec. 20, 2022

Related U.S. Application Data
(63) Continuation of application No. PCT/US2021/042426, filed on Jul. 20, 2021.
(60) Provisional application No. 63/054,525, filed on Jul. 21, 2020.

(51) Int. Cl. G01N 33/573; G01N 33/68

(52) U.S. Cl. CPC G01N 33/573; G01N 2333/8146; G01N 33/6803

(57) ABSTRACT

Described herein are methods for assessing likelihood of response of subjects to activatable therapeutic agents and compositions, kits, and methods of preparing and using activatable therapeutic agents. Also described herein are methods for assessing likelihood of response of subjects to activatable therapeutic agents. In some cases, the activatable therapeutic agents of the compositions, kits, and methods disclosed herein can comprise a mammalian protein-derived sequence.

### RELATED APPLICATIONS

[0001] This application is a continuation of International Patent Application No. PCT/US2021/042426, filed Jul. 20, 2021, which claims priority to U.S. Provisional Patent Application Ser. No. 63/054,525 filed Jul. 21, 2020, the entire disclosure of which is hereby incorporated herein by reference.

### SEQUENCE LISTING

[0002] The instant application contains a Sequence Listing which has been submitted electronically in XML format and is hereby incorporated by reference in its entirety. Said XML file, created on Dec. 19, 2022, is named 737804_SA9-740PCCON_ST26.xml and is 4,005,294 bytes in size.

### BACKGROUND

[0003] A key challenge in developing prodrug therapeutics is avoiding unwanted immunogenicity and nonspecific activation at biological sites in vivo other than the target site. Various release sites have been optimized in vitro and incorporated into prodrugs for programmed and targeted activation, for example, by protease(s) natively produced at or near diseased tissue(s). Such engineered release segments can form T- or B-cell epitopes that can elicit undesired immunogenicity in patients. Further, there is currently a lack of methods for adequately predicting in vivo responses of patients to prodrugs. In particular, with respect to protease-activated prodrugs, diseased tissues being targeted often contain a multitude of proteases with varying activities and specificities, which is difficult to reconstitute in vitro and complicates any prediction of in vivo prodrug activation. There remains a need for identifying new peptide segments that can be incorporated into a variety of prodrug therapeutic, diagnostic and prophylactic compositions for a more effective and reliable release mechanism. There also remains a need for developing more accurate and robust methods for predicting therapeutic responses and outcomes upon administration of prodrugs or other activatable compositions.

### SUMMARY

[0004] In certain aspects, the present disclosure provides a method for assessing a likelihood of a subject being responsive to a therapeutic agent that is activatable by a mammalian protease expressed in the subject, the method comprising:
[0005] (a) determining, in a biological sample from the subject, a presence or an amount of
   [0006] (i) a polypeptide comprising at least five, at least six, at least seven, at least eight, at least nine, or at least ten consecutive amino acid residues shown in a sequence set forth in Column V of Table A (or a subset thereof); or
   [0007] (ii) a polypeptide comprising at least five, at least six, at least seven, at least eight, at least nine, or at least ten consecutive amino acids shown in a sequence set forth in Column IV of Table A (or a subset thereof); or
   [0008] (iii) a polypeptide comprising at least five, at least six, at least seven, at least eight, at least nine, or at least ten consecutive amino acids shown in a sequence set forth in Column VI of Table A (or a subset thereof); and
[0009] (b) designating the subject as being likely to respond to the therapeutic agent when the polypeptide of (i), (ii) or (iii) is present and/or if its amount exceeds a threshold.

[0010] In some embodiments of the method for assessing the likelihood of the subject being responsive to the therapeutic agent, the therapeutic agent comprises a peptide substrate, which peptide substrate is susceptible to cleavage by the mammalian protease at a scissile bond. In some embodiments, the polypeptide of (i), (ii), or (iii) comprises a portion containing at least four, at least five, at least six, at least seven, at least eight, at least nine, or at least ten consecutive amino acid residues of the peptide substrate that is either N-terminal or C-terminal side of the scissile bond. In some embodiments, the peptide substrate is susceptible to cleavage by the mammalian protease at a scissile bond, and wherein the polypeptide of (i), (ii), or (iii) is a cleavage product of a reporter polypeptide comprising a substrate sequence that is susceptible to cleavage by the same mammalian protease at a scissile bond and where the reporter polypeptide comprises a sequence set forth in Column II or III of Table A (or a subset thereof). In some embodiments, the peptide substrate is susceptible to cleavage by the mammalian protease at a scissile bond, and wherein the polypeptide of (i), (ii), or (iii) is a cleavage product of a human protein that comprises a portion containing at least five or six consecutive amino acid residues of the peptide substrate that includes the scissile bond.

[0011] In some embodiments of the method for assessing the likelihood of the subject being responsive to the therapeutic agent, the polypeptide of (i) comprises at least six, at least seven, at least eight, at least nine, or at least ten consecutive amino acid residues shown in a sequence set forth in Column V of Table A (or a subset thereof). In some embodiments, the polypeptide of (ii) comprises at least six, at least seven, at least eight, at least nine, or at least ten consecutive amino acids shown in a sequence set forth in Column IV of Table A (or a subset thereof). In some embodiments, the polypeptide of (iii) comprises at least six, at least seven, at least eight, at least nine, or at least ten consecutive amino acids shown in a sequence set forth in Column VI of Table A (or a subset thereof).

[0012] In some embodiments of the method for assessing the likelihood of the subject being responsive to the therapeutic agent, (a) comprises determining the presence or the amount of any two of (i)-(iii). In some embodiments, (a) comprises determining the presence or the amount of all three of (i)-(iii).

[0013] In some embodiments of the method for assessing the likelihood of the subject being responsive to the therapeutic agent, the threshold is zero or nominal. In some embodiments, the biological sample comprises a serum or plasma sample. In some embodiments, the biological sample comprises a serum sample. In some embodiments, the biological sample comprises a plasma sample.

[0014] In some embodiments of the method for assessing the likelihood of the subject being responsive to the therapeutic agent, the mammalian protease is a serine protease, a cysteine protease, an aspartate protease, a threonine protease, or a metalloproteinase. In some embodiments, the mammalian protease is selected from the group consisting of disintegrin and metalloproteinase domain-containing protein 10 (ADAM10), disintegrin and metalloproteinase domain-containing protein 12 (ADAM12), disintegrin and metalloproteinase domain-containing protein 15 (ADAM15), disintegrin and metalloproteinase domain-containing protein 17 (ADAM17), disintegrin and metalloproteinase domain-containing protein 9 (ADAM9), disintegrin and metalloproteinase with thrombospondin motifs 5 (ADAMTS5), Cathepsin B, Cathepsin D, Cathepsin E, Cathepsin K, cathepsin L, cathepsin S, Fibroblast activation protein alpha, Hepsin, kallikrein-2, kallikrein-4, kallikrein-3, Prostate-specific antigen (PSA), kallikrein-13, Legumain, matrix metallopeptidase 1 (MMP-1), matrix metallopeptidase 10 (MMP-10), matrix metallopeptidase 11 (MMP-11), matrix metallopeptidase 12 (MMP-12), matrix metallopeptidase 13 (MMP-13), matrix metallopeptidase 14 (MMP-14), matrix metallopeptidase 16 (MMP-16), matrix metallopeptidase 2 (MMP-2), matrix metallopeptidase 3 (MMP-3), matrix metallopeptidase 7 (MMP-7), matrix metallopeptidase 8 (MMP-8), matrix metallopeptidase 9 (MMP-9), matrix metallopeptidase 4 (MMP-4), matrix metallopeptidase 5 (MMP-5), matrix metallopeptidase 6 (MMP-6), matrix metallopeptidase 15 (MMP-15), neutrophil elastase, protease activated receptor 2 (PAR2), plasmin, prostasin, PSMA-FOLH1, membrane type serine protease 1 (MT-SP1), matriptase, and u-plasminogen. In some embodiments, the mammalian protease is selected from the group consisting of matrix metallopeptidase 1 (MMP1), matrix metallopeptidase 2 (MMP2), matrix metallopeptidase 7 (MMP1), matrix metallopeptidase 9 (MMP9), matrix metallopeptidase 11 (MMP11), matrix metallopeptidase 14 (MMP14), urokinase-type plasminogen activator (uPA), legumain, and matriptase. In some embodiments, the mammalian protease is preferentially expressed or activated in a target tissue or cell.

[0015] In some embodiments of the method for assessing the likelihood of the subject being responsive to the therapeutic agent, the target tissue or cell is a tumor. In some embodiments, the target tissue or cell produces or is co-localized with the mammalian protease.

[0016] In some embodiments of the method for assessing the likelihood of the subject being responsive to the therapeutic agent, the target tissue or cell contains therein or thereon, or is associated with in proximity thereto, a reporter polypeptide. In some embodiments, the reporter polypeptide is a polypeptide selected from the group consisting of coagulation factor, complement component, tubulin, immunoglobulin, apolipoprotein, serum amyloid, insulin, growth factor, fibrinogen, PDZ domain protein, LIM domain protein, c-reactive protein, serum albumin, versican, collagen, elastin, keratin, kininogen-1, alpha-2-antiplasmin, clusterin, biglycan, alpha-1-antitrypsin, transthyretin, alpha-1-antichymotrypsin, glucagon, hepcidin, thymosin beta-4, haptoglobin, hemoglobin subunit alpha, caveolae-associated protein 2, alpha-2-HS-glycoprotein, chromogranin-A, vitronectin, hemopexin, epididymis secretory sperm binding protein, secretogranin-2, angiotensinogen, transgelin-2, pancreatic prohormone, neurosecretory protein VGF, ceruloplasmin, PDZ and LIM domain protein 1, multimerin-1, inter-alpha-trypsin inhibitor heavy chain H2, N-acetylmuramoyl-L-alanine amidase, histone H1.4, adhesion G-protein coupled receptor G6, mannan-binding lectin serine protease 2, prothrombin, deleted in malignant brain tumors 1 protein, desmoglein-3, calsyntenin-1, alpha-2-macroglobulin, myosin-9, sodium/potassium-transporting ATPase subunit gamma, oncoprotein-induced transcript 3 protein, serglycin, histidine-rich glycoprotein, inter-alpha-trypsin inhibitor heavy chain H5, integrin alpha-IIb, membrane-associated progesterone receptor component 1, histone H1.2, rho GDP-dissociation inhibitor 2, zinc-alpha-2-glycoprotein, talin-1, secretogranin-1, neutrophil defensin 3, cytochrome P450 2E1, gastric inhibitory polypeptide, transcription initiation factor TFIID subunit 1, integral membrane protein 2B, pigment epithelium-derived factor, voltage-dependent N-type calcium channel subunit alpha-1B, ras GTPase-activating protein nGAP, type I cytoskeletal 17, sulfhydryl oxidase 1, homeobox protein Hox-B2, transcription factor SOX-10, E3 ubiquitin-protein ligase SIAH2, decorin, secreted protein acidic and rich in cysteine (SPARC), laminin gamma 1 chain, vimentin, and nidogen-1 (NID1). In some embodiments, the reporter polypeptide is a polypeptide selected from the group consisting of versican, type II collagen alpha-1 chain, kininogen-1, complement C4-A, complement C4-B, complement C3, alpha-2-antiplasmin, clusterin, biglycan, elastin, fibrinogen alpha chain, alpha-1-antitrypsin, fibrinogen beta chain, type III collagen alpha-1 chain, serum amyloid A-1 protein, transthyretin, apolipoprotein A-I, apolipoprotein A-I Isoform 1, alpha-1-antichymotrypsin, glucagon, hepcidin, serum amyloid A-2 protein, thymosin beta-4, haptoglobin, hemoglobin subunit alpha, caveolae-associated protein 2, alpha-2-HS-glycoprotein, chromogranin-A, vitronectin, hemopexin, epididymis secretory sperm binding protein, zyxin, apolipoprotein secretogranin-2, angiotensinogen, c-reactive protein, serum albumin, transgelin-2, pancreatic prohormone, neurosecretory protein VGF, ceruloplasmin, PDZ and LIM domain protein 1, tubulin alpha-4A chain, multimerin-1, inter-alpha-trypsin inhibitor heavy chain H2, apolipoprotein C-I, fibrinogen gamma chain, N-acetylmuramoyl-L-alanine amidase, immunoglobulin lambda variable 3-21, histone H1.4, adhesion G-protein coupled receptor G6, immunoglobulin lambda variable 3-25, immunoglobulin lambda variable 1-51, immunoglobulin lambda variable 1-36, mannan-binding lectin serine protease 2, immunoglobulin kappa variable 3-20, immunoglobulin kappa variable 2-30, insulin-like growth factor II, apolipoprotein A-II, probable non-functional immunoglobulin kappa variable 2D-24, prothrombin, coagulation factor IX, apolipoprotein L1, deleted in malignant brain tumors 1 protein, desmoglein-3, calsyntenin-1, immunoglobulin lambda constant 3, complement C5, alpha-2-macroglobulin, myosin-9, sodium/potassium-transporting ATPase subunit gamma, immunoglobulin kappa variable 2-28, oncoprotein-induced transcript 3 protein, serglycin, coagulation factor XII, coagulation factor XIII A chain, insulin, histidine-rich glycoprotein, immunoglobulin kappa variable 3-11, immunoglobulin kappa variable 1-39, collagen alpha-1(I) chain, inter-alpha-trypsin inhibitor heavy chain H5, latent-transforming growth factor beta-binding protein 2, integrin alpha-11b, membrane-associated progesterone receptor component 1, immunoglobulin lambda variable 6-57, immunoglobulin kappa variable 3-15, complement C1r subcomponent-like protein, histone H1.2, rho GDP-dissociation inhibitor 2, latent-transforming growth factor beta-binding protein 4, collagen alpha-1(XVIII) chain, immunoglobulin lambda variable 2-18, zinc-alpha-2-glycoprotein, talin-1, secretogranin-1, neutrophil defensin 3, cytochrome P450 2E1, gastric inhibitory polypeptide, immunoglobulin heavy variable 3-15, immunoglobulin lambda variable 2-11, transcription initiation factor TFIID subunit 1, collagen alpha-1(VII) chain, integral membrane protein 2B, pigment epithelium-derived factor, voltage-dependent N-type calcium channel subunit alpha-1B, immunoglobulin lambda variable 3-27, ras GTPase-activating protein nGAP, keratin, type I cytoskeletal 17, tubulin beta chain, sulfhydryl oxidase 1, immunoglobulin kappa variable 4-1, complement C1r subcomponent, homeobox protein Hox-B2, transcription factor SOX-10, E3 ubiquitin-protein ligase SIAH2, decorin, SPARC, type I collagen alpha-1 chain, type IV collagen alpha-1 chain, laminin gamma 1 chain, vimentin, type III collagen, type IV collagen alpha-3 chain, type VII collagen alpha-1 chain, type VI collagen alpha-1 chain, type V collagen alpha-1 chain, nidogen-1, and type VI collagen alpha-3 chain. In some embodiments, the reporter polypeptide comprises a sequence set forth in Columns II-VI of Table A (or a subset thereof). In some embodiments, the reporter polypeptide is selected from the group set forth in Column I of Table A (or a subset thereof).

[0017] In some embodiments of the method for assessing the likelihood of the subject being responsive to the therapeutic agent, the target tissue or cell is characterized by an increased amount or activity of the mammalian protease in proximity to the target tissue or cell as compared to a non-target tissue or cell in the subject. In some embodiments, the subject is suffering from, or is suspected of suffering from, a disease or condition characterized by an increased expression or activity of the mammalian protease in proximity to a target tissue or cell as compared to a corresponding non-target tissue or cell in the subject.

[0018] In some embodiments of the method for assessing the likelihood of the subject being responsive to the therapeutic agent, the disease or condition is a cancer or an inflammatory or autoimmune disease. In some embodiments, the disease or condition is selected from the group consisting of carcinoma, Hodgkin's lymphoma, and non-Hodgkin's lymphoma, diffuse large B cell lymphoma, follicular lymphoma, mantle cell lymphoma, blastoma, breast cancer, ER/PR+ breast cancer, Her2+ breast cancer, triple-negative breast cancer, colon cancer, colon cancer with malignant ascites, mucinous tumors, prostate cancer, head and neck cancer, skin cancer, melanoma, genito-urinary tract cancer, ovarian cancer, ovarian cancer with malignant ascites, peritoneal carcinomatosis, uterine serous carcinoma, endometrial cancer, cervix cancer, colorectal, uterine cancer, mesothelioma in the peritoneum, kidney cancer, Wilm's tumor, lung cancer, small-cell lung cancer, non-small cell lung cancer, gastric cancer, stomach cancer, small intestine cancer, liver cancer, hepatocarcinoma, hepatoblastoma, liposarcoma, pancreatic cancer, gall bladder cancer, cancers of the bile duct, esophageal cancer, salivary gland carcinoma, thyroid cancer, epithelial cancer, arrhenoblastoma, adenocarcinoma, sarcoma, and B-cell derived chronic lymphatic leukemia. In some embodiments, the disease or condition is selected from the group consisting of ankylosing spondylitis (AS), arthritis (for example, and not limited to, rheumatoid arthritis (RA), juvenile idiopathic arthritis (JIA), osteoarthritis (OA), psoriatic arthritis (PsA), gout, chronic arthritis), chagas disease, chronic obstructive pulmonary disease (COPD), dermatomyositis, type 1 diabetes, endometriosis, Goodpasture syndrome, Graves' disease, Guillain-Barre syndrome (GB S), Hashimoto's disease, suppurative scab, Kawasaki disease, IgA nephropathy, idiopathic thrombocytopenic purpura, inflammatory bowel disease (IBD) (for example, and not limited to, Crohn's disease (CD), clonal disease, ulcerative colitis, collagen colitis, lymphocytic colitis, ischemic colitis, empty colitis, Behcet's syndrome, infectious colitis, indeterminate colitis, interstitial Cystitis), lupus (for example, and not limited to, systemic lupus erythematosus, discoid lupus, subacute cutaneous lupus erythematosus, cutaneous lupus erythematosus (such as chilblain lupus erythematosus), drug-induced lupus, neonatal lupus, lupus nephritis), mixed connective tissue disease, morphea, multiple sclerosis (MS), severe muscle Force disorder, narcolepsy, neuromuscular angina, pemphigus vulgaris, pernicious anemia, psoriasis, psoriatic arthritis, polymyositis, primary biliary cirrhosis, relapsing polychondritis, schizophrenia, scleroderma, Sjogren's syndrome, systemic stiffness syndrome, temporal arteritis (also known as giant cell arteritis), vasculitis, vitiligo, Wegener's granulomatosis, transplant rejection-associated immune reaction(s) (for example, and not limited to, renal transplant rejection, lung transplant rejection, liver transplant rejection), psoriasis, Wiskott-Aldrich syndrome, autoimmune lymphoproliferative syndrome, myasthenia gravis, inflammatory chronic rhinosinusitis, colitis, celiac disease, Barrett's esophagus, inflammatory gastritis, autoimmune nephritis, autoimmune hepatitis, autoimmune carditis, autoimmune encephalitis, autoimmune mediated hematological disease, asthma, atopic dermatitis, atopy, allergy, allergic rhinitis, scleroderma, bronchitis, pericarditis, the inflammatory disease is, Alzheimer's disease, Parkinson's disease, amyotrophic lateral sclerosis, inflammatory lung disease, inflammatory skin disease, atherosclerosis, myocardial infarction, stroke, gram-positive shock, gram-negative shock, sepsis, septic shock, hemorrhagic shock, anaphylactic shock, systemic inflammatory response syndrome.

[0019] In some embodiments of the method for assessing the likelihood of the subject being responsive to the therapeutic agent, the therapeutic agent is an anti-cancer agent. In some embodiments, the therapeutic agent is an activatable therapeutic agent. In some embodiments, the therapeutic agent is an activatable therapeutic agent, or non-natural, activatable therapeutic agent as described herein.

[0020] In some embodiments of the method for assessing the likelihood of the subject being responsive to the therapeutic agent, the therapeutic agent further comprises a masking moiety (MM). In some embodiments of the method for assessing the likelihood of the subject being responsive to the therapeutic agent, the masking moiety (MM) is capable of being released from the therapeutic agent upon cleavage of the peptide substrate by the mammalian protease. In some embodiments, the masking moiety (MM) interferes with an interaction of the therapeutic agent, in an uncleaved state, to a target tissue or cell. In some embodiments, a bioactivity of the therapeutic agent is capable of being enhanced upon cleavage of the peptide substrate by the mammalian protease. In some embodiments, the masking moiety (MM) is an extended recombinant polypeptide (XTEN). In some embodiments, the XTEN is characterized in that: (i) it comprises at least 100 amino acids; (ii) at least 90% of the amino acid residues of it are selected from glycine (G), alanine (A), serine (S), threonine (T), glutamate (E) and proline (P); and (iii) it comprises at least 4 different types of amino acids selected from G, A, S, T, E, and P.

[0021] In some embodiments of the method for assessing the likelihood of the subject being responsive to the therapeutic agent, further comprises transmitting the designation to a healthcare provider and/or the subject.

[0022] In some embodiments of the method for assessing the likelihood of the subject being responsive to the therapeutic agent, further comprises, subsequent to (b), contacting the therapeutic agent with the mammalian protease.

[0023] In some embodiments of the method for assessing the likelihood of the subject being responsive to the therapeutic agent, further comprises, subsequent to (b), administering to the subject an effective amount of the therapeutic agent based on the designation of step (b).

[0024] In some embodiments of the method for assessing the likelihood of the subject being responsive to the therapeutic agent, (a) comprises detecting the polypeptide of (i), (ii) or (iii) in an immuno-assay. In some embodiments, the immuno-assay utilizes an antibody that specifically binds to the polypeptide of (i), (ii) or (iii), or an epitope thereof.

[0025] In some embodiments of the method for assessing the likelihood of the subject being responsive to the therapeutic agent, (a) comprises detecting the polypeptide of (i), (ii) or (iii) (or a derivative (including fragment(s)) thereof) by using a mass spectrometer (MS)

[0026] In some embodiment of the method is use of a diagnostic reagent for assessing a likelihood of a subject being responsive to a therapeutic agent that is activatable by a mammalian protease expressed in said subject having a disease or disorder.

[0027] In certain aspects the diagnostic reagent is used for assessing a likelihood of a subject being responsive to a therapeutic agent that is activatable by a mammalian protease expressed in said subject having a disease or disorder.

[0028] In some embodiments is a kit for the practice of a method for assessing a likelihood of a subject being responsive to a therapeutic agent that is activatable by a mammalian protease expressed in said subject having a disease or disorder comprising a reagent for detecting the presence or amount of a proteolytic peptide product produced by action of said mammalian protease.

[0029] In certain aspects, the present disclosure provides a method for treating a subject in need of a therapeutic agent that is activatable by a mammalian protease expressed in the subject, the method comprising: administering an effective amount of the therapeutic agent to the subject, wherein the subject has been shown to express in a biological sample from the subject:
[0030] (i) a polypeptide comprising at least five, at least six, at least seven, at least eight, at least nine, or at least ten consecutive amino acid residues shown in a sequence set forth in Column V of Table A (or a subset thereof); or
[0031] (ii) a polypeptide comprising at least five, at least six, at least seven, at least eight, at least nine, or at least ten consecutive amino acids shown in a sequence set forth in Column IV of Table A (or a subset thereof); or
[0032] (iii) a polypeptide comprising at least five, at least six, at least seven, at least eight, at least nine, or at least ten consecutive amino acids shown in a sequence set forth in Column VI of Table A (or a subset thereof); or
[0033] (iv) expression level of polypeptide (i), (ii) or (iii) exceeds a threshold.

[0034] In some embodiments for treating the subject with the therapeutic agent, the polypeptide of (i) comprises at least six, at least seven, at least eight, at least nine, or at least ten consecutive amino acid residues shown in a sequence set forth in Column V of Table A (or a subset thereof). In some embodiments, the polypeptide of (ii) comprises at least six, at least seven, at least eight, at least nine, or at least ten consecutive amino acids shown in a sequence set forth in Column IV of Table A (or a subset thereof). In some embodiments, the polypeptide of (iii) comprises at least six, at least seven, at least eight, at least nine, or at least ten consecutive amino acids shown in a sequence set forth in Column VI of Table A (or a subset thereof). In some embodiments, the subject has been shown to express in the biological sample any two of (i)-(iii). In some embodiments, the subject has been shown to express in the biological sample all three of (i)-(iii).

[0035] In some embodiments for treating the subject with the therapeutic agent, the therapeutic agent comprises a peptide substrate susceptible to cleavage by the mammalian protease. In some embodiments, the peptide substrate is susceptible to cleavage by the mammalian protease at a scissile bond, and wherein the polypeptide of (i), (ii), or (iii) comprises a portion containing at least four consecutive amino acid residues of the peptide substrate that is either N-terminal or C-terminal of the scissile bond. In some embodiments, a portion of the peptide substrate that is N-terminal of the scissile bond has at most three or two amino acid substitutions or at most one amino acid substitution with respect to a C-terminal end sequence containing from four to ten amino acid residues of a sequence set forth in Column IV or V of Table A (or a subset thereof), wherein none of the amino acid substitution is at a position corresponding to an amino acid residue immediately adjacent to a corresponding scissile bond. In some embodiments, a portion of the peptide substrate that is N-terminal of the scissile bond has at most three or two amino acid substitutions or at most one amino acid substitution with respect to a C-terminal end sequence containing from four to ten amino acid residues of a sequence set forth in Column IV of Table A (or a subset thereof), wherein none of the amino acid substitution is at a position corresponding to an amino acid residue immediately adjacent to a corresponding scissile bond. In some embodiments, a portion of the peptide substrate that is N-terminal of the scissile bond has at most three or two amino acid substitutions or at most one amino acid substitution with respect to a C-terminal end sequence containing from four to ten amino acid residues of a sequence set forth in Column V of Table A (or a subset thereof), wherein none of the amino acid substitution is at a position corresponding to an amino acid residue immediately adjacent to a corresponding scissile bond. In some embodiments, the portion of the peptide substrate that is N-terminal of the scissile bond comprises a C-terminal end sequence containing from four to ten amino acid residues of a sequence set forth in Column IV or V of Table A (or a subset thereof). In some embodiments, the portion of the peptide substrate that is N-terminal of the scissile bond comprises a C-terminal end sequence containing from four to ten amino acid residues of a sequence set forth in Column IV of Table A (or a subset thereof). In some embodiments, the portion of the peptide substrate that is N-terminal of the scissile bond comprises a C-terminal end sequence containing from four to ten amino acid residues of a sequence set forth in Column V of Table A (or a subset thereof). In some embodiments, a portion of the peptide substrate that is C-terminal of the scissile bond has at most three or two amino acid substitutions or at most one amino acid substitution with respect to an N-terminal end sequence containing from four to ten amino acid residues of a sequence set forth in Column V or VI of Table A (or a subset thereof), wherein none of the amino acid substitution is at a position corresponding to an amino acid residue immediately adjacent to a corresponding scissile bond. In some embodiments, a portion of the peptide substrate that is C-terminal of the scissile bond has at most three or two amino acid substitutions or at most one amino acid substitution with respect to an N-terminal end sequence containing from four to ten amino acid residues of a sequence set forth in Column V of Table A (or a subset thereof), wherein none of the amino acid substitution is at a position corresponding to an amino acid residue immediately adjacent to a corresponding scissile bond. In some embodiments, a portion of the peptide substrate that is C-terminal of the scissile bond has at most three or two amino acid substitutions or at most one amino acid substitution with respect to an N-terminal end sequence containing from four to ten amino acid residues of a sequence set forth in Column VI of Table A (or a subset thereof), wherein none of the amino acid substitution is at a position corresponding to an amino acid residue immediately adjacent to a corresponding scissile bond. In some embodiments, the portion of the peptide substrate that is C-terminal of the scissile bond comprises an N-terminal end sequence containing from four to ten amino acid residues of a sequence set forth in Column V or VI of Table A (or a subset thereof). In some embodiments, the portion of the peptide substrate that is C-terminal of the scissile bond comprises an N-terminal end sequence containing from four to ten amino acid residues of a sequence set forth in Column V of Table A (or a subset thereof). In some embodiments, the portion of the peptide substrate that is C-terminal of the scissile bond comprises an N-terminal end sequence containing from four to ten amino acid residues of a sequence set forth in Column VI of Table A (or a subset thereof).

[0036] In some embodiments for treating the subject with the therapeutic agent, the threshold is zero or nominal. In some embodiments, the biological sample comprises a serum or plasma sample. In some embodiments, the biological sample comprises a serum sample. In some embodiments, the biological sample comprises a plasma sample.

[0037] In some embodiments for treating the subject with the therapeutic agent, the mammalian protease is a serine protease, a cysteine protease, an aspartate protease, a threonine protease, or a metalloproteinase. In some embodiments, the mammalian protease is selected from the group consisting of disintegrin and metalloproteinase domain-containing protein 10 (ADAM10), disintegrin and metalloproteinase domain-containing protein 12 (ADAM12), disintegrin and metalloproteinase domain-containing protein 15 (ADAM15), disintegrin and metalloproteinase domain-containing protein 17 (ADAM17), disintegrin and metalloproteinase domain-containing protein 9 (ADAM9), disintegrin and metalloproteinase with thrombospondin motifs 5 (ADAMTS5), Cathepsin B, Cathepsin D, Cathepsin E, Cathepsin K, cathepsin L, cathepsin S, Fibroblast activation protein alpha, Hepsin, kallikrein-2, kallikrein-4, kallikrein-3, Prostate-specific antigen (PSA), kallikrein-13, Legumain, matrix metallopeptidase 1 (MMP-1), matrix metallopeptidase 10 (MMP-10), matrix metallopeptidase 11 (MMP-11), matrix metallopeptidase 12 (MMP-12), matrix metallopeptidase 13 (MMP-13), matrix metallopeptidase 14 (MMP-14), matrix metallopeptidase 16 (MMP-16), matrix metallopeptidase 2 (MMP-2), matrix metallopeptidase 3 (MMP-3), matrix metallopeptidase 7 (MMP-7), matrix metallopeptidase 8 (MMP-8), matrix metallopeptidase 9 (MMP-9), matrix metallopeptidase 4 (MMP-4), matrix metallopeptidase 5 (MMP-5), matrix metallopeptidase 6 (MMP-6), matrix metallopeptidase 15 (MMP-15), neutrophil elastase, protease activated receptor 2 (PAR2), plasmin, prostasin, PSMA-FOLH1, membrane type serine protease 1 (MT-SP1), matriptase, and u-plasminogen. In some embodiments, the mammalian protease is selected from the group consisting of matrix metallopeptidase 1 (MMP1), matrix metallopeptidase 2 (MMP2), matrix metallopeptidase 7 (MMP1), matrix metallopeptidase 9 (MMP9), matrix metallopeptidase 11 (MMP11), matrix metallopeptidase 14 (MMP14), urokinase-type plasminogen activator (uPA), legumain, and matriptase. In some embodiments, the mammalian protease is preferentially expressed or activated in a target tissue or cell. In some embodiments, the target tissue or cell is a tumor. In some embodiments, the target tissue or cell produces or is co-localized with the mammalian protease.

[0038] In some embodiments for treating the subject with the therapeutic agent, the target tissue or cell contains therein or thereon, or is associated with in proximity thereto, a reporter polypeptide. In some embodiments, the reporter polypeptide is a polypeptide selected from the group consisting of coagulation factor, complement component, tubulin, immunoglobulin, apolipoprotein, serum amyloid, insulin, growth factor, fibrinogen, PDZ domain protein, LIM domain protein, c-reactive protein, serum albumin, versican, collagen, elastin, keratin, kininogen-1, alpha-2-antiplasmin, clusterin, biglycan, alpha-1-antitrypsin, transthyretin, alpha-1-antichymotrypsin, glucagon, hepcidin, thymosin beta-4, haptoglobin, hemoglobin subunit alpha, caveolae-associated protein 2, alpha-2-HS-glycoprotein, chromogranin-A, vitronectin, hemopexin, epididymis secretory sperm binding protein, secretogranin-2, angiotensinogen, transgelin-2, pancreatic prohormone, neurosecretory protein VGF, ceruloplasmin, PDZ and LIM domain protein 1, multimerin-1, inter-alpha-trypsin inhibitor heavy chain H2, N-acetylmuramoyl-L-alanine amidase, histone H1.4, adhesion G-protein coupled receptor G6, mannan-binding lectin serine protease 2, prothrombin, deleted in malignant brain tumors 1 protein, desmoglein-3, calsyntenin-1, alpha-2-macroglobulin, myosin-9, sodium/potassium-transporting ATPase subunit gamma, oncoprotein-induced transcript 3 protein, serglycin, histidine-rich glycoprotein, inter-alpha-trypsin inhibitor heavy chain H5, integrin alpha-IIb, membrane-associated progesterone receptor component 1, histone H1.2, rho GDP-dissociation inhibitor 2, zinc-alpha-2-glycoprotein, talin-1, secretogranin-1, neutrophil defensin 3, cytochrome P450 2E1, gastric inhibitory polypeptide, transcription initiation factor TFIID subunit 1, integral membrane protein 2B, pigment epithelium-derived factor, voltage-dependent N-type calcium channel subunit alpha-1B, ras GTPase-activating protein nGAP, type I cytoskeletal 17, sulfhydryl oxidase 1, homeobox protein Hox-B2, transcription factor SOX-10, E3 ubiquitin-protein ligase SIAH2, decorin, secreted protein acidic and rich in cysteine (SPARC), laminin gamma 1 chain, vimentin, and nidogen-1 (NID1). In some embodiments, the reporter polypeptide is a polypeptide selected from the group consisting of versican, type II collagen alpha-1 chain, kininogen-1, complement C4-A, complement C4-B, complement C3, alpha-2-antiplasmin, clusterin, biglycan, elastin, fibrinogen alpha chain, alpha-1-antitrypsin, fibrinogen beta chain, type III collagen alpha-1 chain, serum amyloid A-1 protein, transthyretin, apolipoprotein A-I, apolipoprotein A-I Isoform 1, alpha-1-antichymotrypsin, glucagon, hepcidin, serum amyloid A-2 protein, thymosin beta-4, haptoglobin, hemoglobin subunit alpha, caveolae-associated protein 2, alpha-2-HS-glycoprotein, chromogranin-A, vitronectin, hemopexin, epididymis secretory sperm binding protein, zyxin, apolipoprotein secretogranin-2, angiotensinogen, c-reactive protein, serum albumin, transgelin-2, pancreatic prohormone, neurosecretory protein VGF, ceruloplasmin, PDZ and LIM domain protein 1, tubulin alpha-4A chain, multimerin-1, inter-alpha-trypsin inhibitor heavy chain H2, apolipoprotein C-I, fibrinogen gamma chain, N-acetylmuramoyl-L-alanine amidase, immunoglobulin lambda variable 3-21, histone H1.4, adhesion G-protein coupled receptor G6, immunoglobulin lambda variable 3-25, immunoglobulin lambda variable 1-51, immunoglobulin lambda variable 1-36, mannan-binding lectin serine protease 2, immunoglobulin kappa variable 3-20, immunoglobulin kappa variable 2-30, insulin-like growth factor II, apolipoprotein A-II, probable non-functional immunoglobulin kappa variable 2D-24, prothrombin, coagulation factor IX, apolipoprotein L1, deleted in malignant brain tumors 1 protein, desmoglein-3, calsyntenin-1, immunoglobulin lambda constant 3, complement C5, alpha-2-macroglobulin, myosin-9, sodium/potassium-transporting ATPase subunit gamma, immunoglobulin kappa variable 2-28, oncoprotein-induced transcript 3 protein, serglycin, coagulation factor XII, coagulation factor XIII A chain, insulin, histidine-rich glycoprotein, immunoglobulin kappa variable 3-11, immunoglobulin kappa variable 1-39, collagen alpha-1(I) chain, inter-alpha-trypsin inhibitor heavy chain H5, latent-transforming growth factor beta-binding protein 2, integrin alpha-IIb, membrane-associated progesterone receptor component 1, immunoglobulin lambda variable 6-57, immunoglobulin kappa variable 3-15, complement C1r subcomponent-like protein, histone H1.2, rho GDP-dissociation inhibitor 2, latent-transforming growth factor beta-binding protein 4, collagen alpha-1(XVIII) chain, immunoglobulin lambda variable 2-18, zinc-alpha-2-glycoprotein, talin-1, secretogranin-1, neutrophil defensin 3, cytochrome P450 2E1, gastric inhibitory polypeptide, immunoglobulin heavy variable 3-15, immunoglobulin lambda variable 2-11, transcription initiation factor TFIID subunit 1, collagen alpha-1(VII) chain, integral membrane protein 2B, pigment epithelium-derived factor, voltage-dependent N-type calcium channel subunit alpha-1B, immunoglobulin lambda variable 3-27, ras GTPase-activating protein nGAP, keratin, type I cytoskeletal 17, tubulin beta chain, sulfhydryl oxidase 1, immunoglobulin kappa variable 4-1, complement C1r subcomponent, homeobox protein Hox-B2, transcription factor SOX-10, E3 ubiquitin-protein ligase SIAH2, decorin, SPARC, type I collagen alpha-1 chain, type IV collagen alpha-1 chain, laminin gamma 1 chain, vimentin, type III collagen, type IV collagen alpha-3 chain, type VII collagen alpha-1 chain, type VI collagen alpha-1 chain, type V collagen alpha-1 chain, nidogen-1, and type VI collagen alpha-3 chain. In some embodiments, the reporter polypeptide comprises a sequence set forth in Columns II-VI of Table A (or a subset thereof). In some embodiments, the reporter polypeptide is selected from the group set forth in Column I of Table A (or a subset thereof).

[0039] In some embodiments for treating the subject with the therapeutic agent, the target tissue or cell is characterized by an increased amount or activity of the mammalian protease in proximity to the target tissue or cell as compared to a non-target tissue or cell in the subject. In some embodiments, the subject is suffering from, or is suspected of suffering from, a disease or condition characterized by an increased expression or activity of the mammalian protease in proximity to a target tissue or cell as compared to a corresponding non-target tissue or cell in the subject. In some embodiments, the disease or condition is a cancer or an inflammatory or autoimmune disease. In some embodiments, the disease or condition is selected from the group consisting of ankylosing spondylitis (AS), arthritis (for example, and not limited to, rheumatoid arthritis (RA), juvenile idiopathic arthritis (JIA), osteoarthritis (OA), psoriatic arthritis (PsA), gout, chronic arthritis), chagas disease, chronic obstructive pulmonary disease (COPD), dermatomyositis, type 1 diabetes, endometriosis, Goodpasture syndrome, Graves' disease, Guillain-Barre syndrome (GBS), Hashimoto's disease, suppurative scab, Kawasaki disease, IgA nephropathy, idiopathic thrombocytopenic purpura, inflammatory bowel disease (IBD) (for example, and not limited to, Crohn's disease (CD), clonal disease, ulcerative colitis, collagen colitis, lymphocytic colitis, ischemic colitis, empty colitis, Behcet's syndrome, infectious colitis, indeterminate colitis, interstitial Cystitis), lupus (for example, and not limited to, systemic lupus erythematosus, discoid lupus, subacute cutaneous lupus erythematosus, cutaneous lupus erythematosus (such as chilblain lupus erythematosus), drug-induced lupus, neonatal lupus, lupus nephritis), mixed connective tissue disease, morphea, multiple sclerosis (MS), severe muscle Force disorder, narcolepsy, neuromuscular angina, pemphigus vulgaris, pernicious anemia, psoriasis, psoriatic arthritis, polymyositis, primary biliary cirrhosis, relapsing polychondritis, schizophrenia, scleroderma, Sjogren's syndrome, systemic stiffness syndrome, temporal arteritis (also known as giant cell arteritis), vasculitis, vitiligo, Wegener's granulomatosis, transplant rejection-associated immune reaction(s) (for example, and not limited to, renal transplant rejection, lung transplant rejection, liver transplant rejection), psoriasis, Wiskott-Aldrich syndrome, autoimmune lymphoproliferative syndrome, myasthenia gravis, inflammatory chronic rhinosinusitis, colitis, celiac disease, Barrett's esophagus, inflammatory gastritis, autoimmune nephritis, autoimmune hepatitis, autoimmune carditis, autoimmune encephalitis, autoimmune mediated hematological disease, asthma, atopic dermatitis, atopy, allergy, allergic rhinitis, scleroderma, bronchitis, pericarditis, the inflammatory disease is, Alzheimer's disease, Parkinson's disease, amyotrophic lateral sclerosis, inflammatory lung disease, inflammatory skin disease, atherosclerosis, myocardial infarction, stroke, gram-positive shock, gram-negative shock, sepsis, septic shock, hemorrhagic shock, anaphylactic shock, systemic inflammatory response syndrome. In some embodiments, the disease or condition is selected from the group consisting of carcinoma, Hodgkin's lymphoma, and non-Hodgkin's lymphoma, diffuse large B cell lymphoma, follicular lymphoma, mantle cell lymphoma, blastoma, breast cancer, ER/PR+ breast cancer, Her2+ breast cancer, triple-negative breast cancer, colon cancer, colon cancer with malignant ascites, mucinous tumors, prostate cancer, head and neck cancer, skin cancer, melanoma, genito-urinary tract cancer, ovarian cancer, ovarian cancer with malignant ascites, peritoneal carcinomatosis, uterine serous carcinoma, endometrial cancer, cervix cancer, colorectal, uterine cancer, mesothelioma in the peritoneum, kidney cancer, Wilm's tumor, lung cancer, small-cell lung cancer, non-small cell lung cancer, gastric cancer, stomach cancer, small intestine cancer, liver cancer, hepatocarcinoma, hepatoblastoma, liposarcoma, pancreatic cancer, gall bladder cancer, cancers of the bile duct, esophageal cancer, salivary gland carcinoma, thyroid cancer, epithelial cancer, arrhenoblastoma, adenocarcinoma, sarcoma, and B-cell derived chronic lymphatic leukemia. In some embodiments, the therapeutic agent is an anti-cancer agent. In some embodiments, the therapeutic agent is an activatable therapeutic agent. In some embodiments, the therapeutic agent is a non-natural, activatable therapeutic agent as described herein.

[0040] In some embodiments for treating the subject with the therapeutic agent, the therapeutic agent comprises a masking moiety (MM). In some embodiments, the masking moiety (MM) is capable of being released from the therapeutic agent upon cleavage of the peptide substrate by the mammalian protease. In some embodiments, the masking moiety (MM) interferes with an interaction of the therapeutic agent, in an uncleaved state, to a target tissue or cell. In some embodiments, a bioactivity of the therapeutic agent is capable of being enhanced upon cleavage of the peptide substrate by the mammalian protease. In some embodiments, the masking moiety (MM) is an extended recombinant polypeptide (XTEN). In some embodiments, the XTEN is characterized in that: (i) it comprises at least 100 amino acids; (ii) at least 90% of the amino acid residues of it are selected from glycine (G), alanine (A), serine (S), threonine (T), glutamate (E) and proline (P); and (iii) it comprises at least 4 different types of amino acids selected from G, A, S, T, E, and P.

[0041] In some embodiments for treating the subject with the therapeutic agent, the subject is determined to have a likelihood of a response to the therapeutic agent by a method as described herein.

[0042] In certain aspects, the present disclosure provides a method for treating a disease or condition in a subject, comprising administering to the subject in need thereof one or more therapeutically effective doses of a therapeutic agent as described herein, or a pharmaceutical composition as described herein.

[0043] In some embodiments for the method for treating the disease or condition in the subject, the subject is selected from the group consisting of mouse, rat, monkey, and human. In some embodiments, the subject is a human. In some embodiments, the subject is determined to have a likelihood of a response to the therapeutic agent or the pharmaceutical composition. In some embodiments, the likelihood of the response is 50% or higher. In some embodiments, the likelihood of the response is determined by a method as described herein.

[0044] In some embodiments for the method for treating the disease or condition in the subject, the disease or condition is a cancer or an inflammatory or autoimmune disease. In some embodiments, the disease or condition is selected from the group consisting of ankylosing spondylitis (AS), arthritis (for example, and not limited to, rheumatoid arthritis (RA), juvenile idiopathic arthritis (JIA), osteoarthritis (OA), psoriatic arthritis (PsA), gout, chronic arthritis), chagas disease, chronic obstructive pulmonary disease (COPD), dermatomyositis, type 1 diabetes, endometriosis, Goodpasture syndrome, Graves' disease, Guillain-Barre syndrome (GBS), Hashimoto's disease, suppurative scab, Kawasaki disease, IgA nephropathy, idiopathic thrombocytopenic purpura, inflammatory bowel disease (IBD) (for example, and not limited to, Crohn's disease (CD), clonal disease, ulcerative colitis, collagen colitis, lymphocytic colitis, ischemic colitis, empty colitis, Behcet's syndrome, infectious colitis, indeterminate colitis, interstitial Cystitis), lupus (for example, and not limited to, systemic lupus erythematosus, discoid lupus, subacute cutaneous lupus erythematosus, cutaneous lupus erythematosus (such as chilblain lupus erythematosus), drug-induced lupus, neonatal lupus, lupus nephritis), mixed connective tissue disease, morphea, multiple sclerosis (MS), severe muscle Force disorder, narcolepsy, neuromuscular angina, pemphigus vulgaris, pernicious anemia, psoriasis, psoriatic arthritis, polymyositis, primary biliary cirrhosis, relapsing polychondritis, schizophrenia, scleroderma, Sjogren's syndrome, systemic stiffness syndrome, temporal arteritis (also known as giant cell arteritis), vasculitis, vitiligo, Wegener's granulomatosis, transplant rejection-associated immune reaction(s) (for example, and not limited to, renal transplant rejection, lung transplant rejection, liver transplant rejection), psoriasis, Wiskott-Aldrich syndrome, autoimmune lymphoproliferative syndrome, myasthenia gravis, inflammatory chronic rhinosinusitis, colitis, celiac disease, Barrett's esophagus, inflammatory gastritis, autoimmune nephritis, autoimmune hepatitis, autoimmune carditis, autoimmune encephalitis, autoimmune mediated hematological disease, asthma, atopic dermatitis, atopy, allergy, allergic rhinitis, scleroderma, bronchitis, pericarditis, the inflammatory disease is, Alzheimer's disease, Parkinson's disease, amyotrophic lateral sclerosis, inflammatory lung disease, inflammatory skin disease, atherosclerosis, myocardial infarction, stroke, gram-positive shock, gram-negative shock, sepsis, septic shock, hemorrhagic shock, anaphylactic shock, systemic inflammatory response syndrome. In some embodiments, the disease or condition is selected from the group consisting of carcinoma, Hodgkin's lymphoma, and non-Hodgkin's lymphoma, diffuse large B cell lymphoma, follicular lymphoma, mantle cell lymphoma, blastoma, breast cancer, ER/PR+ breast cancer, Her2+ breast cancer, triple-negative breast cancer, colon cancer, colon cancer with malignant ascites, mucinous tumors, prostate cancer, head and neck cancer, skin cancer, melanoma, genito-urinary tract cancer, ovarian cancer, ovarian cancer with malignant ascites, peritoneal carcinomatosis, uterine serous carcinoma, endometrial cancer, cervix cancer, colorectal, uterine cancer, mesothelioma in the peritoneum, kidney cancer, Wilm's tumor, lung cancer, small-cell lung cancer, non-small cell lung cancer, gastric cancer, stomach cancer, small intestine cancer, liver cancer, hepatocarcinoma, hepatoblastoma, liposarcoma, pancreatic cancer, gall bladder cancer, cancers of the bile duct, esophageal cancer, salivary gland carcinoma, thyroid cancer, epithelial cancer, arrhenoblastoma, adenocarcinoma, sarcoma, and B-cell derived chronic lymphatic leukemia.

[0045] In certain aspects, the present disclosure provides use of a therapeutic agent as described herein in the preparation of a medicament for the treatment of a disease or condition in a subject.

[0046] In certain aspects, the present disclosure provides use of a pharmaceutical composition as described herein in the preparation of a medicament for the treatment of a disease or condition in a subject.

[0047] In some embodiments of the use, the subject is selected from the group consisting of mouse, rat, monkey, and human. In some embodiments, the subject is a human. In some embodiments, the subject is determined to have a likelihood of a response to the therapeutic agent or the pharmaceutical composition. In some embodiments, the likelihood of the response is 50% or higher. In some embodiments, the likelihood of the response is determined by a method as described herein.

[0048] In some embodiments of the use, the disease or condition is a cancer or an inflammatory or autoimmune disease. In some embodiments, the disease or condition is selected from the group consisting of carcinoma, Hodgkin's lymphoma, and non-Hodgkin's lymphoma, diffuse large B cell lymphoma, follicular lymphoma, mantle cell lymphoma, blastoma, breast cancer, ER/PR+ breast cancer, Her2+ breast cancer, triple-negative breast cancer, colon cancer, colon cancer with malignant ascites, mucinous tumors, prostate cancer, head and neck cancer, skin cancer, melanoma, genito-urinary tract cancer, ovarian cancer, ovarian cancer with malignant ascites, peritoneal carcinomatosis, uterine serous carcinoma, endometrial cancer, cervix cancer, colorectal, uterine cancer, mesothelioma in the peritoneum, kidney cancer, Wilm's tumor, lung cancer, small-cell lung cancer, non-small cell lung cancer, gastric cancer, stomach cancer, small intestine cancer, liver cancer, hepatocarcinoma, hepatoblastoma, liposarcoma, pancreatic cancer, gall bladder cancer, cancers of the bile duct, esophageal cancer, salivary gland carcinoma, thyroid cancer, epithelial cancer, arrhenoblastoma, adenocarcinoma, sarcoma, and B-cell derived chronic lymphatic leukemia. In some embodiments, the disease or condition is selected from the group consisting of ankylosing spondylitis (AS), arthritis (for example, and not limited to, rheumatoid arthritis (RA), juvenile idiopathic arthritis (JIA), osteoarthritis (OA), psoriatic arthritis (PsA), gout, chronic arthritis), chagas disease, chronic obstructive pulmonary disease (COPD), dermatomyositis, type 1 diabetes, endometriosis, Goodpasture syndrome, Graves' disease, Guillain-Barre syndrome (GB S), Hashimoto's disease, suppurative scab, Kawasaki disease, IgA nephropathy, idiopathic thrombocytopenic purpura, inflammatory bowel disease (IBD) (for example, and not limited to, Crohn's disease (CD), clonal disease, ulcerative colitis, collagen colitis, lymphocytic colitis, ischemic colitis, empty colitis, Behcet's syndrome, infectious colitis, indeterminate colitis, interstitial Cystitis), lupus (for example, and not limited to, systemic lupus erythematosus, discoid lupus, subacute cutaneous lupus erythematosus, cutaneous lupus erythematosus (such as chilblain lupus erythematosus), drug-induced lupus, neonatal lupus, lupus nephritis), mixed connective tissue disease, morphea, multiple sclerosis (MS), severe muscle Force disorder, narcolepsy, neuromuscular angina, pemphigus vulgaris, pernicious anemia, psoriasis, psoriatic arthritis, polymyositis, primary biliary cirrhosis, relapsing polychondritis, schizophrenia, scleroderma, Sjogren's syndrome, systemic stiffness syndrome, temporal arteritis (also known as giant cell arteritis), vasculitis, vitiligo, Wegener's granulomatosis, transplant rejection-associated immune reaction(s) (for example, and not limited to, renal transplant rejection, lung transplant rejection, liver transplant rejection), psoriasis, Wiskott-Aldrich syndrome, autoimmune lymphoproliferative syndrome, myasthenia gravis, inflammatory chronic rhinosinusitis, colitis, celiac disease, Barrett's esophagus, inflammatory gastritis, autoimmune nephritis, autoimmune hepatitis, autoimmune carditis, autoimmune encephalitis, autoimmune mediated hematological disease, asthma, atopic dermatitis, atopy, allergy, allergic rhinitis, scleroderma, bronchitis, pericarditis, the inflammatory disease is, Alzheimer's disease, Parkinson's disease, amyotrophic lateral sclerosis, inflammatory lung disease, inflammatory skin disease, atherosclerosis, myocardial infarction, stroke, gram-positive shock, gram-negative shock, sepsis, septic shock, hemorrhagic shock, anaphylactic shock, systemic inflammatory response syndrome.

[0049] In some aspects, the present disclosure provides a therapeutic agent (e.g., activatable therapeutic agent, or non-natural, activatable therapeutic agent) comprising a release segment (RS) linked, directly or indirectly, to a biologically active moiety (BM), wherein the RS comprises a peptide substrate having an amino acid sequence susceptible to cleavage by a mammalian protease at a scissile bond, wherein the peptide substrate comprises an amino acid sequence having at most three amino acid substitutions (or at most two amino acid substitutions, or at most one amino acid substitution) with respect to a sequence set forth in Column II or III of Table A (or a subset thereof).

[0050] In some aspects, the present disclosure provides a therapeutic agent (e.g., activatable therapeutic agent, or non-natural, activatable therapeutic agent) comprising a release segment (RS) linked, directly or indirectly, to a biologically active moiety (BM), wherein the RS comprises a peptide substrate having an amino acid sequence susceptible to cleavage by a mammalian protease at a scissile bond, wherein the therapeutic agent is configured for activation at or in proximity to a target tissue or cell in a subject,

[0051] wherein the target tissue or cell contains therein or thereon, or is associated with in proximity thereto, a reporter sequence capable of being cleaved by the mammalian protease at a cleavage sequence, and

[0052] wherein the peptide substrate comprises an amino acid sequence having at most three amino acid substitutions (or at most two amino acid substitutions, or at most one amino acid substitution) with respect to the cleavage sequence of the reporter polypeptide.

[0053] In some embodiments of the therapeutic agent, the reporter polypeptide is a coagulation factor, complement component, tubulin, immunoglobulin, apolipoprotein, serum amyloid, insulin, growth factor, fibrinogen, PDZ domain protein, LIM domain protein, c-reactive protein, serum albumin, versican, collagen, elastin, keratin, kininogen-1, alpha-2-antiplasmin, clusterin, biglycan, alpha-1-antitrypsin, transthyretin, alpha-1-antichymotrypsin, glucagon, hepcidin, thymosin beta-4, haptoglobin, hemoglobin subunit alpha, caveolae-associated protein 2, alpha-2-HS-glycoprotein, chromogranin-A, vitronectin, hemopexin, epididymis secretory sperm binding protein, secretogranin-2, angiotensinogen, transgelin-2, pancreatic prohormone, neurosecretory protein VGF, ceruloplasmin, PDZ and LIM domain protein 1, multimerin-1, inter-alpha-trypsin inhibitor heavy chain H2, N-acetylmuramoyl-L-alanine amidase, histone H1.4, adhesion G-protein coupled receptor G6, mannan-binding lectin serine protease 2, prothrombin, deleted in malignant brain tumors 1 protein, desmoglein-3, calsyntenin-1, alpha-2-macroglobulin, myosin-9, sodium/potassium-transporting ATPase subunit gamma, oncoprotein-induced transcript 3 protein, serglycin, histidine-rich glycoprotein, inter-alpha-trypsin inhibitor heavy chain H5, integrin alpha-IIb, membrane-associated progesterone receptor component 1, histone H1.2, rho GDP-dissociation inhibitor 2, zinc-alpha-2-glycoprotein, talin-1, secretogranin-1, neutrophil defensin 3, cytochrome P450 2E1, gastric inhibitory polypeptide, transcription initiation factor TFIID subunit 1, integral membrane protein 2B, pigment epithelium-derived factor, voltage-dependent N-type calcium channel subunit alpha-1B, ras GTPase-activating protein nGAP, type I cytoskeletal 17, sulfhydryl oxidase 1, homeobox protein Hox-B2, transcription factor SOX-10, E3 ubiquitin-protein ligase SIAH2, decorin, secreted protein acidic and rich in cysteine (SPARC), laminin gamma 1 chain, vimentin, and nidogen-1 (NID1).

[0054] In some embodiments of the therapeutic agent, the reporter polypeptide is a polypeptide selected from the group consisting of versican, type II collagen alpha-1 chain, kininogen-1, complement C4-A, complement C4-B, complement C3, alpha-2-antiplasmin, clusterin, biglycan, elastin, fibrinogen alpha chain, alpha-1-antitrypsin, fibrinogen beta chain, type III collagen alpha-1 chain, serum amyloid A-1 protein, transthyretin, apolipoprotein A-I, apolipoprotein A-I Isoform 1, alpha-1-antichymotrypsin, glucagon, hepcidin, serum amyloid A-2 protein, thymosin beta-4, haptoglobin, hemoglobin subunit alpha, caveolae-associated protein 2, alpha-2-HS-glycoprotein, chromogranin-A, vitronectin, hemopexin, epididymis secretory sperm binding protein, zyxin, apolipoprotein secretogranin-2, angiotensinogen, c-reactive protein, serum albumin, transgelin-2, pancreatic prohormone, neurosecretory protein VGF, ceruloplasmin, PDZ and LIM domain protein 1, tubulin alpha-4A chain, multimerin-1, inter-alpha-trypsin inhibitor heavy chain H2, apolipoprotein C-I, fibrinogen gamma chain, N-acetylmuramoyl-L-alanine amidase, immunoglobulin lambda variable 3-21, histone H1.4, adhesion G-protein coupled receptor G6, immunoglobulin lambda variable 3-25, immunoglobulin lambda variable 1-51, immunoglobulin lambda variable 1-36, mannan-binding lectin serine protease 2, immunoglobulin kappa variable 3-20, immunoglobulin kappa variable 2-30, insulin-like growth factor II, apolipoprotein A-II, probable non-functional immunoglobulin kappa variable 2D-24, prothrombin, coagulation factor IX, apolipoprotein L1, deleted in malignant brain tumors 1 protein, desmoglein-3, calsyntenin-1, immunoglobulin lambda constant 3, complement C5, alpha-2-macroglobulin, myosin-9, sodium/potassium-transporting ATPase subunit gamma, immunoglobulin kappa variable 2-28, oncoprotein-induced transcript 3 protein, serglycin, coagulation factor XII, coagulation factor XIII A chain, insulin, histidine-rich glycoprotein, immunoglobulin kappa variable 3-11, immunoglobulin kappa variable 1-39, collagen alpha-1(I) chain, inter-alpha-trypsin inhibitor heavy chain H5, latent-transforming growth factor beta-binding protein 2, integrin alpha-IIb, membrane-associated progesterone receptor component 1, immunoglobulin lambda variable 6-57, immunoglobulin kappa variable 3-15, complement C1r subcomponent-like protein, histone H1.2, rho GDP-dissociation inhibitor 2, latent-transforming growth factor beta-binding protein 4, collagen alpha-1(XVIII) chain, immunoglobulin lambda variable 2-18, zinc-alpha-2-glycoprotein, talin-1, secretogranin-1, neutrophil defensin 3, cytochrome P450 2E1, gastric inhibitory polypeptide, immunoglobulin heavy variable 3-15, immunoglobulin lambda variable 2-11, transcription initiation factor TFIID subunit 1, collagen alpha-1(VII) chain, integral membrane protein 2B, pigment epithelium-derived factor, voltage-dependent N-type calcium channel subunit alpha-1B, immunoglobulin lambda variable 3-27, ras GTPase-activating protein nGAP, keratin, type I cytoskeletal 17, tubulin beta chain, sulfhydryl oxidase 1, immunoglobulin kappa variable 4-1, complement C1r subcomponent, homeobox protein Hox-B2, transcription factor SOX-10, E3 ubiquitin-protein ligase SIAH2, decorin, SPARC, type I collagen alpha-1 chain, type IV collagen alpha-1 chain, laminin gamma 1 chain, vimentin, type III collagen, type IV collagen alpha-3 chain, type VII collagen alpha-1 chain, type VI collagen alpha-1 chain, type V collagen alpha-1 chain, nidogen-1, and type VI collagen alpha-3 chain.

[0055] In some embodiments of the therapeutic agent, the cleavage sequence of the reporter polypeptide is a cleavage sequence set forth in Column II or III of Table A (or a subset thereof). In some embodiments, the cleavage sequence does not comprise a methionine residue immediately N-terminal to a scissile bond (contained therein), when the methionine is the first residue at N terminus of the reporter polypeptide. In some embodiments, the target tissue or cell is characterized by an increased amount or activity of the mammalian protease in proximity to the target tissue or cell as compared to a non-target tissue or cell in the subject. In some embodiments, the mammalian proatease is produced at the target tissue or cell. In some embodiments, the peptide substrate comprises an amino acid sequence having at most three amino acid substitutions, or at most two amino acid substitutions, or at most one amino acid substitution with respect to a sequence set forth in Column II or III of Table A (or a subset thereof). In some embodiments, the peptide substrate comprises an amino acid sequence having at most three amino acid substitutions with respect to a sequence set forth in Column II or III of Table A (or a subset thereof). In some embodiments, the scissile bond is not immediately C-terminal to a methionine residue.

[0056] In some embodiments of the therapeutic agent, the peptide substrate contains from six to twenty-five or six to twenty amino acid residues. In some embodiments of the therapeutic agent, the peptide substrate contains from six to twenty-five amino acid residues. In some embodiments of the therapeutic agent, the peptide substrate contains from six to twenty amino acid residues. In some embodiments, the peptide substrate contains from seven to twelve amino acid residues. In some embodiments, the peptide substrate comprises an amino acid sequence having at most two amino acid substitutions with respect to a sequence set forth in Column II or III of Table A (or a subset thereof). In some embodiments, the peptide substrate comprises an amino acid sequence having at most one amino acid substitution with respect to a sequence set forth in Column II or III of Table A (or a subset thereof). In some embodiments, none of the at most three amino acid substitutions, or the at most two amino acid substitutions, or the at most one amino acid substitution is at a position corresponding to an amino acid residue immediately adjacent to a corresponding scissile bond of the corresponding sequence shown in Column II or III of Table A (or a subset thereof). In some embodiments, the peptide substrate comprises an amino acid sequence identical to a sequence set forth in Column II or III of Table A (or a subset thereof). In some embodiments, the peptide substrate does not comprise a methionine residue immediately N-terminal to a scissile bond (contained therein). In some embodiments, the peptide substrate does not comprise an amino acid sequence selected from the group consisting of #279, #280, #282, #283, #298, #299, #302, #303, #305, #307, #308, #349, #396, #397, #416, #417, #418, #458, #459, #460, #466, #481 and #482 (or any combination thereof) of Column II of Table A. In some embodiments, the peptide substrate comprises two or three sequences set forth in Column II or III of Table A (or a subset thereof). In some embodiments, where the peptide substrate comprises two sequences set forth in Column II or III of Table A (or a subset thereof), the two sequences partially overlap one another. In some embodiments, where the peptide substrate comprises two sequences set forth in Column II or III of Table A (or a subset thereof), the two sequences do not overlap one another. In some embodiments, where the peptide substrate comprises three sequences set forth in Column II or III of Table A (or a subset thereof), two or all of the three sequences do not overlap one another. In some embodiments, where the peptide substrate comprises three sequences set forth in Column II or III of Table A (or a subset thereof), one of the three sequences partially overlaps with another sequence or both other sequences of the three sequences. In some embodiments, where the peptide substrate comprises three sequences set forth in Column II or III of Table A (or a subset thereof), two of the three sequences partially overlap with one another. In some embodiments, where the peptide substrate comprises three sequences set forth in Column II or III of Table A (or a subset thereof), each two of the three sequences partially overlap with one another. In some embodiments, where the peptide substrate comprises three sequences set forth in Column II or III of Table A (or a subset thereof), all of the three sequences partially overlap with one another. In some embodiments, the peptide substrate susceptible to cleavage by the mammalian protease is susceptible to cleavage by a plurality of mammalian proteases comprising the mammalian protease. In some embodiments, the peptide substrate susceptible to cleavage by the plurality of mammalian proteases has at most three amino acid substitutions, or at most two amino acid substitutions, or at most one amino acid substitution with respect to a sequence set forth in Table 1(j). In some embodiments, the peptide substrate susceptible to cleavage by the plurality of mammalian proteases has at most three amino acid substitutions with respect to a sequence set forth in Table 1(j). In some embodiments, the peptide substrate susceptible to cleavage by the plurality of mammalian proteases has at most two amino acid substitutions with respect to a sequence set forth in Table 1(j). In some embodiments, the peptide substrate susceptible to cleavage by the plurality of mammalian proteases has at most one amino acid substitution with respect to a sequence set forth in Table 1(j). In some embodiments, none of the at most three amino acid substitutions, or the at most two amino acid substitutions, or the at most one amino acid substitution is at a position corresponding to an amino acid residue immediately adjacent to a corresponding scissile bond of the corresponding sequence set forth in Table 1(j). In some embodiments, the peptide substrate susceptible to cleavage by the plurality of mammalian proteases comprises a sequence set forth in Table 1(j).

[0057] In some embodiments of the therapeutic agent, the release segment (RS) is capable of being cleaved when in proximity to a target tissue or cell, and wherein the target tissue or cell produces the mammalian protease for which the RS is a peptide substrate. In some embodiments, the mammalian protease for cleavage of the release segment (RS) is a serine protease, a cysteine protease, an aspartate protease, a threonine protease, or a metalloproteinase. In some embodiments, the mammalian protease for cleavage of the release segment (RS) is selected from the group consisting of disintegrin and metalloproteinase domain-containing protein 10 (ADAM10), disintegrin and metalloproteinase domain-containing protein 12 (ADAM12), disintegrin and metalloproteinase domain-containing protein 15 (ADAM15), disintegrin and metalloproteinase domain-containing protein 17 (ADAM17), disintegrin and metalloproteinase domain-containing protein 9 (ADAM9), disintegrin and metalloproteinase with thrombospondin motifs 5 (ADAMTS5), Cathepsin B, Cathepsin D, Cathepsin E, Cathepsin K, cathepsin L, cathepsin S, Fibroblast activation protein alpha, Hepsin, kallikrein-2, kallikrein-4, kallikrein-3, Prostate-specific antigen (PSA), kallikrein-13, Legumain, matrix metallopeptidase 1 (MMP-1), matrix metallopeptidase 10 (MMP-10), matrix metallopeptidase 11 (MMP-11), matrix metallopeptidase 12 (MMP-12), matrix metallopeptidase 13 (MMP-13), matrix metallopeptidase 14 (MMP-14), matrix metallopeptidase 16 (MMP-16), matrix metallopeptidase 2 (MMP-2), matrix metallopeptidase 3 (MMP-3), matrix metallopeptidase 7 (MMP-7), matrix metallopeptidase 8 (MMP-8), matrix metallopeptidase 9 (MMP-9), matrix metallopeptidase 4 (MMP-4), matrix metallopeptidase 5 (MMP-5), matrix metallopeptidase 6 (MMP-6), matrix metallopeptidase 15 (MMP-15), neutrophil elastase, protease activated receptor 2 (PAR2), plasmin, prostasin, PSMA-FOLH1, membrane type serine protease 1 (MT-SP1), matriptase, and u-plasminogen. In some embodiments, the mammalian protease for cleavage of the release segment (RS) is selected from the group consisting of matrix metallopeptidase 1 (MMP1), matrix metallopeptidase 2 (MMP2), matrix metallopeptidase 7 (MMP1), matrix metallopeptidase 9 (MMP9), matrix metallopeptidase 11 (MMP11), matrix metallopeptidase 14 (MMP14), urokinase-type plasminogen activator (uPA), legumain, and matriptase.

[0058] In some embodiments of the therapeutic agent, the therapeutic agent further comprises a masking moiety (MM) linked, directly or indirectly, to the release segment (RS). In some embodiments, the therapeutic agent, in an uncleaved state, has a structural arrangement from N-terminus to C-terminus of BM-RS-MM or MM-RS-BM. In some embodiments of the therapeutic agent, upon cleavage of the release segment (RS), the masking moiety (MM) is released from the therapeutic agent. In some embodiments, the masking moiety (MM) comprises an extended recombinant polypeptide (XTEN). In some embodiments, the XTEN is characterized in that: (i) it comprises at least 100 amino acids; (ii) at least 90% of the amino acid residues of it are selected from glycine (G), alanine (A), serine (S), threonine (T), glutamate (E) and proline (P); and (iii) it comprises at least 4 different types of amino acids selected from G, A, S, T, E, and P. In some embodiments, the extended recombinant polypeptide (XTEN) comprises an amino acid sequence having at least 90%, 91%, 92%, 93%, 94%, 95%, 96%, 97%, 98%, 99%, or 100% sequence identity to a sequence set forth in Tables 2b-2c. In some embodiments, the masking moiety (MM), when linked to the therapeutic agent, interferes with an interaction of the biologically active moiety (BM) to the target tissue or cell such that a dissociation constant (K_{d}) of the BM of the therapeutic agent with a target cell marker borne by the target tissue or cell is greater, when the therapeutic agent is in an uncleaved state, compared to a dissociation constant (Kd) of a corresponding biologically active moiety with the target cell marker. In some embodiments, the therapeutic agent effects a broader therapeutic window in delivery of the BM to the target tissue or cell compared to a corresponding biologically active moiety. In some embodiments, the therapeutic agent has a longer terminal half-life compared to that of a corresponding biologically active moiety. In some embodiments, the therapeutic agent is less immunogenic compared to a corresponding biologically active moiety. In some embodiments, the immunogenicity is ascertained by measuring production of IgG antibodies that selectively bind to the biologically active moiety after administration of comparable doses to a subject. In some embodiments, the therapeutic agent has a greater apparent molecular weight factor under a physiological condition compared to a corresponding biologically active moiety.

[0059] In some embodiments of the therapeutic agent, the release segment (RS) is a first release segment (RS1), wherein the scissile bond is a first scissile bond, and wherein the therapeutic agent further comprises a second release segment (RS2) linked, directly or indirectly, to the biologically active moiety (BM), wherein the RS2 comprises a second peptide substrate or cleavage by a mammalian protease at a second scissile bond. In some embodiments, the mammalian protease for cleavage of the RS2 is identical to the mammalian protease for cleavage of the RS1. In some embodiments, the mammalian protease for cleavage of the RS2 is different from the mammalian protease for cleavage of the RS1. In some embodiments, the RS2 has an amino acid sequence identical to that of the RS1. In some embodiments, the RS2 has an amino acid sequence different from that of the RS1. In some embodiments, each of the RS1 and the RS2 comprises a peptide substrate for a different mammalian protease selected from the group consisting of disintegrin and metalloproteinase domain-containing protein 10 (ADAM10), disintegrin and metalloproteinase domain-containing protein 12 (ADAM12), disintegrin and metalloproteinase domain-containing protein 15 (ADAM15), disintegrin and metalloproteinase domain-containing protein 17 (ADAM17), disintegrin and metalloproteinase domain-containing protein 9 (ADAM9), disintegrin and metalloproteinase with thrombospondin motifs 5 (ADAMTS5), Cathepsin B, Cathepsin D, Cathepsin E, Cathepsin K, cathepsin L, cathepsin S, Fibroblast activation protein alpha, Hepsin, kallikrein-2, kallikrein-4, kallikrein-3, Prostate-specific antigen (PSA), kallikrein-13, Legumain, matrix metallopeptidase 1 (MMP-1), matrix metallopeptidase 10 (MMP-10), matrix metallopeptidase 11 (MMP-11), matrix metallopeptidase 12 (MMP-12), matrix metallopeptidase 13 (MMP-13), matrix metallopeptidase 14 (MMP-14), matrix metallopeptidase 16 (MMP-16), matrix metallopeptidase 2 (MMP-2), matrix metallopeptidase 3 (MMP-3), matrix metallopeptidase 7 (MMP-7), matrix metallopeptidase 8 (MMP-8), matrix metallopeptidase 9 (MMP-9), matrix metallopeptidase 4 (MMP-4), matrix metallopeptidase 5 (MMP-5), matrix metallopeptidase 6 (MMP-6), matrix metallopeptidase 15 (MMP-15), neutrophil elastase, protease activated receptor 2 (PAR2), plasmin, prostasin, PSMA-FOLH1, membrane type serine protease 1 (MT-SP1), matriptase, and u-plasminogen. In some embodiments, each of the RS1 and the RS2 comprises a peptide substrate for a different mammalian protease selected from the group consisting of matrix metallopeptidase 1 (MMP1), matrix metallopeptidase 2 (MMP2), matrix metallopeptidase 7 (MMP1), matrix metallopeptidase 9 (MMP9), matrix metallopeptidase 11 (MMP11), matrix metallopeptidase 14 (MMP14), urokinase-type plasminogen activator (uPA), legumain, and matriptase. In some embodiments, the second scissile bond is not immediately C-terminal to a methionine residue.

[0060] In some embodiments of the therapeutic agent, the second peptide substrate contains from six to twenty-five or six to twenty amino acid residues. In some embodiments of the therapeutic agent, the second peptide substrate contains from six to twenty-five amino acid residues. In some embodiments of the therapeutic agent, the second peptide substrate contains from six to twenty amino acid residues. In some embodiments, the second peptide substrate contains from seven to twelve amino acid residues. In some embodiments, the second peptide substrate comprises an amino acid sequence having at most three amino acid substitutions, or at most two amino acid substitutions, or at most one amino acid substitution with respect to a sequence set forth in Column II or III of Table A (or a subset thereof). In some embodiments, the second peptide substrate comprises an amino acid sequence having at most three amino acid substitutions with respect to a sequence set forth in Column II or III of Table A (or a subset thereof). In some embodiments, the second peptide substrate comprises an amino acid sequence having at most two amino acid substitutions with respect to a sequence set forth in Column II or III of Table A (or a subset thereof). In some embodiments, the second peptide substrate comprises an amino acid sequence having at most one amino acid substitution with respect to a sequence set forth in Column II or III of Table A (or a subset thereof). In some embodiments, none of the at most three amino acid substitutions, or the at most two amino acid substitutions, or the at most one amino acid substitution (of the second peptide substrate) is at a position corresponding to an amino acid residue immediately adjacent to a corresponding scissile bond of the corresponding sequence shown in Column II or III of Table A (or a subset thereof). In some embodiments, the second peptide substrate comprises an amino acid sequence identical to a sequence set forth in Column II or III of Table A (or a subset thereof). In some embodiments, the second peptide substrate does not comprise a methionine residue immediately N-terminal to a scissile bond (contained therein). In some embodiments, the second peptide substrate does not comprise an amino acid sequence selected from the group consisting of #279, #280, #282, #283, #298, #299, #302, #303, #305, #307, #308, #349, #396, #397, #416, #417, #418, #458, #459, #460, #466, #481 and #482 (or any combination thereof) of Column II of Table A. In some embodiments, the second peptide substrate comprises two or three sequences set forth in Column II or III of Table A (or a subset thereof). In some embodiments, where the second peptide substrate comprises two sequences set forth in Column II or III of Table A (or a subset thereof), the two sequences (of the second peptide substrate) partially overlap one another. In some embodiments, where the second peptide substrate comprises two sequences set forth in Column II or III of Table A (or a subset thereof), the two sequences (of the second peptide substrate) do not overlap one another. In some embodiments, where the second peptide substrate comprises three sequences set forth in Column II or III of Table A (or a subset thereof), two or all of the three sequences (of the second peptide substrate) do not overlap one another. In some embodiments, where the second peptide substrate comprises three sequences set forth in Column II or III of Table A (or a subset thereof), one of the three sequences (of the second peptide substrate) partially overlaps with another sequence or both other sequences of the three sequences (of the second peptide substrate). In some embodiments, where the second peptide substrate comprises three sequences set forth in Column II or III of Table A (or a subset thereof), two of the three sequences (of the second peptide substrate) partially overlap with one another. In some embodiments, where the second peptide substrate comprises three sequences set forth in Column II or III of Table A (or a subset thereof), each two of the three sequences (of the second peptide substrate) partially overlap with one another. In some embodiments, where the second peptide substrate comprises three sequences set forth in Column II or III of Table A (or a subset thereof), all of the three sequences (of the second peptide substrate) partially overlap with one another. In some embodiments, the second peptide substrate susceptible to cleavage by the mammalian protease is susceptible to cleavage by a plurality of mammalian proteases comprising the mammalian protease. In some embodiments, the second peptide substrate susceptible to cleavage by the plurality of mammalian proteases has at most three amino acid substitutions, or at most two amino acid substitutions, or at most one amino acid substitution with respect to a sequence set forth in Table 1(j). In some embodiments, the second peptide substrate susceptible to cleavage by the plurality of mammalian proteases has at most three amino acid substitutions with respect to a sequence set forth in Table 1(j). In some embodiments, the second peptide substrate susceptible to cleavage by the plurality of mammalian proteases has at most two amino acid substitutions with respect to a sequence set forth in Table 1(j). In some embodiments, the second peptide substrate susceptible to cleavage by the plurality of mammalian proteases has at most one amino acid substitution with respect to a sequence set forth in Table 1(j). In some embodiments, none of the at most three amino acid substitutions, or the at most two amino acid substitutions, or the at most one amino acid substitution (of the second peptide substrate) is at a position corresponding to an amino acid residue immediately adjacent to a corresponding scissile bond of the corresponding sequence set forth in Table 1(j). In some embodiments, the second peptide substrate susceptible to cleavage by the plurality of mammalian proteases comprises a sequence set forth in Table 1(j).

[0061] In some embodiments of the therapeutic agent, the second release segment (RS2) is capable of being cleaved when in proximity to the target tissue or cell, and wherein the target tissue or cell produces the mammalian protease for which the RS2 is a peptide substrate. This includes tumor produced proteases and tumor melieu produced proteases. In some embodiments, the mammalian protease for cleavage of the second release segment (RS2) is a serine protease, a cysteine protease, an aspartate protease, a threonine protease or a metalloproteinase. In some embodiments, the mammalian protease for cleavage of the release segment (RS) is selected from the group consisting of disintegrin and metalloproteinase domain-containing protein 10 (ADAM10), disintegrin and metalloproteinase domain-containing protein 12 (ADAM12), disintegrin and metalloproteinase domain-containing protein 15 (ADAM15), disintegrin and metalloproteinase domain-containing protein 17 (ADAM17), disintegrin and metalloproteinase domain-containing protein 9 (ADAM9), disintegrin and metalloproteinase with thrombospondin motifs 5 (ADAMTS5), Cathepsin B, Cathepsin D, Cathepsin E, Cathepsin K, cathepsin L, cathepsin S, Fibroblast activation protein alpha, Hepsin, kallikrein-2, kallikrein-4, kallikrein-3, Prostate-specific antigen (PSA), kallikrein-13, Legumain, matrix metallopeptidase 1 (MMP-1), matrix metallopeptidase 10 (MMP-10), matrix metallopeptidase 11 (MMP-11), matrix metallopeptidase 12 (MMP-12), matrix metallopeptidase 13 (MMP-13), matrix metallopeptidase 14 (MMP-14), matrix metallopeptidase 16 (MMP-16), matrix metallopeptidase 2 (MMP-2), matrix metallopeptidase 3 (MMP-3), matrix metallopeptidase 7 (MMP-7), matrix metallopeptidase 8 (MMP-8), matrix metallopeptidase 9 (MMP-9), matrix metallopeptidase 4 (MMP-4), matrix metallopeptidase 5 (MMP-5), matrix metallopeptidase 6 (MMP-6), matrix metallopeptidase 15 (MMP-15), neutrophil elastase, protease activated receptor 2 (PAR2), plasmin, prostasin, PSMA-FOLH1, membrane type serine protease 1 (MT-SP1), matriptase, and u-plasminogen. In some embodiments, the mammalian protease for cleavage of the second release segment (RS2) is selected from the group consisting of matrix metallopeptidase 1 (MMP1), matrix metallopeptidase 2 (MMP2), matrix metallopeptidase 7 (MMP1), matrix metallopeptidase 9 (MMP9), matrix metallopeptidase 11 (MMP11), matrix metallopeptidase 14 (MMP14), urokinase-type plasminogen activator (uPA), legumain, and matriptase.

[0062] In some embodiments of the therapeutic agent, the masking moiety (MM) is a first masking moiety (MM1), and wherein the therapeutic agent further comprises a second masking moiety (MM2) linked, directly or indirectly, to the second release segment (RS2). In some embodiments, the therapeutic agent, in an uncleaved state, has a structural arrangement from N-terminus to C-terminus of MM1-RS1-BM-RS2-MM2, MM1-RS2-BM-RS1-MM2, MM2-RS1-BM-RS2-MM1, or MM2-RS2-BM-RS1-MM1. In some embodiments of the therapeutic agent, upon cleavage of the second release segment (RS2), the second masking moiety (MM2) is released from the therapeutic agent. In some embodiments, the second masking moiety (MM2) comprises a second extended recombinant polypeptide (XTEN2). In some embodiments, the XTEN2 is characterized in that: (i) it comprises at least 100 amino acids; (ii) at least 90% of the amino acid residues of it are selected from glycine (G), alanine (A), serine (S), threonine (T), glutamate (E) and proline (P); and (iii) it comprises at least 4 different types of amino acids selected from G, A, S, T, E, and P. In some embodiments, the XTEN2 comprises an amino acid sequence having at least 90%, 91%, 92%, 93%, 94%, 95%, 96%, 97%, 98%, 99%, or 100% sequence identity to a sequence selected from the group of sequences set forth in Tables 2b-2c. In some embodiments, the first masking moiety (MM1) and the second masking moiety (MM2), when both linked in the therapeutic agent, interfere with an interaction of the biologically active moiety (BM) to the target tissue or cell such that a dissociation constant (K_{d}) of the BM of the therapeutic agent with a target cell marker borne by the target tissue or cell is greater, when the therapeutic agent is in an uncleaved state, compared to a dissociation constant (Kd) of a corresponding biologically active moiety. In some embodiments, the therapeutic agent, in which the biologically active moiety (BM) is linked, directly or indirectly, to one or both of the first masking moiety (MM1) and the second masking moiety (MM2), effects a broader therapeutic window in delivery of the BM to the target tissue or cell compared to a corresponding biologically active moiety. In some embodiments, the therapeutic agent, in which the biologically active moiety (BM) is linked, directly or indirectly, to one or both of the first masking moiety (MM1) and the second masking moiety (MM2), has a longer terminal half-life compared to that of a corresponding biologically active moiety. In some embodiments, the therapeutic agent, in which the biologically active moiety (BM) is linked, directly or indirectly, to one or both of the first masking moiety (MM1) and the second masking moiety (MM2), is less immunogenic compared to a corresponding biologically active moiety. In some embodiments of the therapeutic agent, immunogenicity is ascertained by measuring production of IgG antibodies that selectively bind to the biologically active moiety after administration of comparable doses to a subject. In some embodiments, the therapeutic agent, in which the biologically active moiety (BM) is linked, directly or indirectly, to one or both of the first masking moiety (MM1) and the second masking moiety (MM2), has a greater apparent molecular weight factor under a physiological condition compared to a corresponding biologically active moiety. In some embodiments, the therapeutic agent comprises a fusion polypeptide or conjugate.

[0063] In some embodiments of the therapeutic agent, the biologically active moiety (BM) comprises a biologically active peptide (BP). In some embodiments, the BP comprises an antibody, a cytokine, a cell receptor, or a fragment thereof.

[0064] In some embodiments, the therapeutic agent comprises a recombinant polypeptide. In some embodiments, the recombinant polypeptide comprises the biologically active peptide (BP) and the release segment (RS). In some embodiments, the recombinant polypeptide comprises the biologically active peptide (BP), the release segment (RS), and the masking moiety (MM). In some embodiments, the recombinant polypeptide, in an uncleaved state, has a structural arrangement from N-terminus to C-terminus of BP-RS-MM or MM-RS-BP. In some embodiments, the recombinant polypeptide comprises the biologically active peptide (BP), the first release segment (RS1), and the second release segment (RS2). In some embodiments, the recombinant polypeptide comprises the biologically active peptide (BP), the first release segment (RS1), the second release segment (RS2), the first masking moiety (MM1), and the second masking moiety (MM2). In some embodiments, the recombinant polypeptide, in an uncleaved state, has a structural arrangement from N-terminus to C-terminus of MM1-RS1-BP-RS2-MM2, MM1-RS2-BP-RS1-MM2, MM2-RS1-BP-RS2-MM1, or MM2-RS2-BP-RS1-MM1. In some embodiments, the recombinant polypeptide comprises the biologically active peptide (BP), the first release segment (RS1), the second release segment (RS2), the first extended recombinant polypeptide (XTEN1), and the second extended recombinant polypeptide (XTEN2). In some embodiments, the recombinant polypeptide, in an uncleaved state, has a structural arrangement from N-terminus to C-terminus of XTEN1-RS1-BP-RS2-XTEN2, XTEN1-RS2-BP-RS1-XTEN2, XTEN2-RS1-BP-RS2-XTEN1, or XTEN2-RS2-BP-RS1-XTEN1.

[0065] In some embodiments of the therapeutic agent, the biologically active polypeptide (BP) comprises a binding moiety having a binding affinity for a target cell marker on the target tissue or cell. In some embodiments, the target cell marker is an effector cell antigen expressed on a surface of an effector cell. In some embodiments, the binding moiety is an antibody. In some embodiments, the binding moiety is an antibody selected from the group consisting of Fv, Fab, Fab′, Fab′-SH, nanobody (also known as single domain antibody or V_{HH}), linear antibody, and single-chain variable fragment (scFv). In some embodiments, the binding moiety is a first binding moiety, wherein the target cell marker is a first target cell marker, and wherein the biologically active polypeptide (BP) further comprises a second binding moiety linked, directly or indirectly to the first binding moiety, wherein the second binding moiety has a binding affinity for a second target cell marker on the target tissue or cell. In some embodiments, the second target cell marker is a marker on a tumor cell or a cancer cell. In some embodiments, the second binding moiety is an antibody. In some embodiments, the second binding moiety is an antibody selected from the group consisting of Fv, Fab, Fab′, Fab′-SH, nanobody (also known as single domain antibody or V_{HH}), linear antibody, and single-chain variable fragment (scFv).

[0066] Certain aspects of the present disclosure provide an isolated nucleic acid, the isolated nucleic acid comprising: (a) a polynucleotide encoding a recombinant polypeptide as described herein; or (b) a reverse complement of the polynucleotide of (a).

[0067] Certain aspects of the present disclosure provide an expression vector, the expression vector comprising a polynucleotide sequence as described herein and a recombinant regulatory sequence operably linked to the polynucleotide sequence.

[0068] Certain aspects of the present disclosure provide an isolated host cell, the isolated cell comprising the expression vector as described herein. In some embodiments, the host cell is a prokaryote. In some embodiments, the host cell is E. coli or a mammalian cell. In some embodiments, the host cell is E. coli. In some embodiments, the host cell is a mammalian cell.

[0069] Some aspects of the present disclosure provide a pharmaceutical composition, the pharmaceutical composition comprising a therapeutic agent as described herein and one or more pharmaceutically suitable excipients. In some embodiments, the pharmaceutical composition is formulated for oral, intradermal, subcutaneous, intravenous, intra-arterial, intraabdominal, intraperitoneal, intrathecal, or intramuscular administration. In some embodiments, the pharmaceutical composition is in a liquid form or frozen form. In some embodiments, the pharmaceutical composition is in a pre-filled syringe for a single injection. In some embodiments, the pharmaceutical composition is formulated as a lyophilized powder to be reconstituted prior to administration.

[0070] Some aspects of the present disclosure provide a kit, the kit comprising a pharmaceutical composition as described herein, a container, and a label or package insert on or associated with the container.

[0071] In certain aspects, the present disclosure provides a method for preparing a therapeutic agent (e.g., activatable therapeutic agent, or non-natural, activatable therapeutic agent) as provided herein.

[0072] In certain aspects, the present disclosure provides a method for preparing a therapeutic agent (e.g., activatable therapeutic agent, or non-natural, activatable therapeutic agent), the method comprising:
[0073] (a) culturing a host cell comprising a nucleic acid construct that encodes a recombinant polypeptide under conditions sufficient to express the recombinant polypeptide in the host cell, wherein the recombinant polypeptide comprises a biologically active polypeptide (BP), a release segment (RS), and a masking moiety (MM), wherein:
   [0074] the RS comprises a peptide substrate susceptible for cleavage by a mammalian protease at a scissile bond, wherein the peptide substrate comprises an amino acid sequence having at most three or two amino acid substitutions (or at most one amino acid substitution) with respect to a sequence set forth in Column II or III of Table A (or a subset thereof); and
   [0075] the recombinant polypeptide has a structural arrangement from N-terminus to C-terminus of BP-RS-MM or MM-RS-BP; and
[0076] (b) recovering the therapeutic agent (e.g., activatable therapeutic agent, or non-natural, activatable therapeutic agent) comprising the recombinant polypeptide.

[0077] In some embodiments of the method for preparing the therapeutic agent, the peptide substrate susceptible to cleavage by the mammalian protease is susceptible to cleavage by a plurality of mammalian proteases comprising the mammalian protease. In some embodiments, the peptide substrate susceptible to cleavage by the plurality of mammalian proteases has at most three amino acid substitutions, or at most two amino acid substitutions, or at most one amino acid substitution with respect to a sequence set forth in Table 1(j). In some embodiments, the peptide substrate susceptible to cleavage by the plurality of mammalian proteases comprises a sequence set forth in Table 1(j). In some embodiments, the peptide substrate does not comprise SEQ ID NO: 1. In some embodiments, the peptide substrate does not comprise SEQ ID NO: 2. In some embodiments, the peptide substrate does not comprise SEQ ID NO: 3. In some embodiments, the peptide substrate does not comprise SEQ ID NO: 4. In some embodiments, the peptide substrate does not comprise SEQ ID NO: 5. In some embodiments, the peptide substrate does not comprise SEQ ID NO: 6. In some embodiments, the peptide substrate does not comprise SEQ ID NO: 7. In some embodiments, the peptide substrate does not comprise SEQ ID NO: 8. In some embodiments, the masking moiety (MM) comprises an extended recombinant polypeptide (XTEN).

[0078] In some embodiments of the method for preparing the therapeutic agent, the release segment (RS) is a first release segment (RS1), wherein the peptide substrate is a first peptide substrate, wherein the scissile bond is a first scissile bond, wherein the masking moiety (MM) is a first masking moiety (MM1), and wherein the recombinant polypeptide further comprises a second release segment (RS2), and a second masking moiety (MM2), wherein: the RS2 comprises a second peptide substrate susceptible for cleavage by a mammalian protease at a second scissile bond, wherein the second peptide substrate comprises an amino acid sequence having at most three amino acid substitutions, or at most two amino acid substitutions, or at most one amino acid substitution with respect to a sequence set forth in Column II or III of Table A (or a subset thereof); and the recombinant polypeptide has a structural arrangement from N-terminus to C-terminus of MM1-RS1-BP-RS2-MM2, MM1-RS2-BP-RS1-MM2, MM2-RS1-BP-RS2-MM1, or MM2-RS2-BP-RS1-MM1.

[0079] In some embodiments of the method for preparing the therapeutic agent, the second peptide substrate susceptible to cleavage by the mammalian protease is susceptible to cleavage by a plurality of mammalian proteases comprising the mammalian protease. In some embodiments, the second peptide substrate susceptible to cleavage by the plurality of mammalian proteases has at most three amino acid substitutions, or at most two amino acid substitutions, or at most one amino acid substitution with respect to a sequence set forth in Table 1(j). In some embodiments, the second peptide substrate susceptible to cleavage by the plurality of mammalian proteases comprises a sequence set forth in Table 1(j). In some embodiments, the second peptide substrate does not comprise SEQ ID NO: 1. In some embodiments, the second peptide substrate does not comprise SEQ ID NO: 2. In some embodiments, the second peptide substrate does not comprise SEQ ID NO: 3. In some embodiments, the second peptide substrate does not comprise SEQ ID NO: 4. In some embodiments, the second peptide substrate does not comprise SEQ ID NO: 5. In some embodiments, the second peptide substrate does not comprise SEQ ID NO: 6. In some embodiments, the second peptide substrate does not comprise SEQ ID NO: 7. In some embodiments, the second peptide substrate does not comprise SEQ ID NO: 8. In some embodiments, one of the first masking moiety (MM1) and the second masking moiety (MM2) comprises an extended recombinant polypeptide (XTEN). In some embodiments, the extended recombinant polypeptide (XTEN) is characterized in that: (i) it comprises at least 100 amino acids; (ii) at least 90% of the amino acid residues of it are selected from glycine (G), alanine (A), serine (S), threonine (T), glutamate (E) and proline (P); and (iii) it comprises at least 4 different types of amino acids selected from G, A, S, T, E, and P. In some embodiments, the extended recombinant polypeptide (XTEN) comprises an amino acid sequence having at least 90%, 91%, 92%, 93%, 94%, 95%, 96%, 97%, 98%, 99%, or 100% sequence identity to a sequence selected from the group set forth in Tables 2b-2c. In some embodiments, the extended recombinant polypeptide (XTEN) is a first extended recombinant polypeptide (XTEN1), and wherein the other one of the first masking moiety (MM1) and the second masking moiety (MM2) comprises a second extended recombinant polypeptide (XTEN2). In some embodiments, the second extended recombinant polypeptide (XTEN2) is characterized in that: (i) it comprises at least 100 amino acids; (ii) at least 90% of the amino acid residues of it are selected from glycine (G), alanine (A), serine (S), threonine (T), glutamate (E) and proline (P); and (iii) it comprises at least 4 different types of amino acids selected from G, A, S, T, E, and P. In some embodiments, the XTEN1 and the XTEN2 each comprise an amino acid sequence having at least 90%, 91%, 92%, 93%, 94%, 95%, 96%, 97%, 98%, 99%, or 100% sequence identity to a sequence selected from the group of sequences set forth in Tables 2b-2c.

[0080] In some embodiments of the method for preparing the therapeutic agent, the masking moiety (MM), when linked to the recombinant polypeptide, interferes with an interaction of the BP to a target tissue or cell such that a dissociation constant (K_{d}) of the BP of the recombinant polypeptide with a target cell marker borne by the target tissue or cell is greater, when the recombinant polypeptide is in an uncleaved state, compared to a dissociation constant (K_{d}) of a corresponding biologically active peptide, as measured in an in vitro assay under equivalent molar concentrations. In some embodiments, the first masking moiety (MM1) and the second masking moiety (MM2), when both linked in the recombinant polypeptide, interfere with an interaction of the BP to a target tissue or cell such that a dissociation constant (K_{d}) of the BP of the recombinant polypeptide with a target cell marker borne by the target tissue or cell is greater, when the recombinant polypeptide is in an uncleaved state, compared to a dissociation constant (K_{d}) of a corresponding biologically active peptide, as measured in an in vitro assay under equivalent molar concentrations. In some embodiments, the in vitro assay is selected from cell membrane integrity assay, mixed cell culture assay, cell-based competitive binding assay, FACS based propidium Iodide assay, trypan Blue influx assay, photometric enzyme release assay, radiometric 51Cr release assay, fluorometric Europium release assay, CalceinAM release assay, photometric MTT assay, XTT assay, WST-1 assay, alamar blue assay, radiometric 3H-Thd incorporation assay, clonogenic assay measuring cell division activity, fluorometric rhodamine123 assay measuring mitochondrial transmembrane gradient, apoptosis assay monitored by FACS-based phosphatidylserine exposure, ELISA-based TUNEL test assay, sandwich ELISA, caspase activity assay, cell-based LDH release assay, and cell morphology assay, or any combination thereof. In some embodiments, the activatable therapeutic agent is an activatable therapeutic agent or non-natural, activatable therapeutic agent as described herein.

[0081] Additional aspects and advantages of the present disclosure will become readily apparent to those skilled in this art from the following detailed description, wherein only illustrative embodiments of the present disclosure are shown and described. As will be realized, the present disclosure is capable of other and different embodiments, and its several details are capable of modifications in various obvious respects, all without departing from the disclosure. Accordingly, the drawings and description are to be regarded as illustrative in nature, and not as restrictive.

### INCORPORATION BY REFERENCE

[0082] All publications, patents, and patent applications mentioned in this specification are herein incorporated by reference to the same extent as if each individual publication, patent, or patent application was specifically and individually indicated to be incorporated by reference. To the extent publications and patents or patent applications incorporated by reference contradict the disclosure contained in the specification, the specification is intended to supersede and/or take precedence over any such contradictory material.

### BRIEF DESCRIPTION OF THE DRAWINGS

[0083] The novel features of the invention are set forth with particularity in the appended claims. A better understanding of the features and advantages of the present invention will be obtained by reference to the following detailed description that sets forth illustrative embodiments, in which the principles of the invention are utilized, and the accompanying drawings (also “Figure” and “FIG.” herein), of which:

[0084] FIG. 1 illustrates the nomenclature of a peptide biomarker sequence in a reporter polypeptide (e.g., a protein within or adjacent to a target tissue or cell from which a biomarker sequence is generated) (such as any set forth in Table A). The illustrative reporter polypeptide sequence comprises two cleavage sequences, a first cleavage sequence and a second cleavage sequence (such as any set forth in Table A), both capable of being recognized and cleaved by mammalian enzyme(s) (such as mammalian protease(s)). For example, in some cases, the first and second cleavage sequences can be recognized and cleaved by the same enzyme or the same set of enzymes. As another example, in some cases, the first and second cleavage sequences can be recognized and cleaved by different enzymes or different sets of enzymes. The first cleavage sequence contains a first scissile bond; and the second cleavage sequence, which is C-terminal to the first cleavage sequence, contains a second scissile bond. The first and second scissile bonds (such as indicated with hyphen (-) in Table A) divide the illustrative reporter polypeptide into three portions. By cleaving the illustrative reporter polypeptide with the corresponding enzyme(s) for which both the first and second cleavage sequences are substrates for, an N-terminal fragment (N-terminal to the first scissile bond), a center fragment (between the first and second scissile bonds), and a C-terminal fragment (C-terminal to the second scissile bond) can be obtained. The N-terminal, center, or C-terminal fragment (if present) (such as any set forth in Table A), or a derivative thereof, can function as a peptide biomarker sequence. The first or second cleavage sequence (such as any set forth in Table A) can be incorporated into a release segment of an activatable therapeutic agent (such as any described herein).

[0085] FIG. 2 illustrates the nomenclature of a peptide substrate and a scissile bond thereof for cleavage. The illustrative peptide substrate contains eight consecutive amino acid residues, of which four amino acid residues (with side chain groups, in the order from the N-terminus to the C-terminus, R₄, R₃, R₂, and R₁) are immediately N-terminal to the scissile bond and four amino acid residues (with side chain groups, in the order from the N-terminus to the C-terminus, R′₁, R′₂, R′₃, and R′₄) are immediately C-terminal to the scissile bond. For example, mammalian proteases can recognize up to four residues on both sides of the scissile bond. Upon cleavage, the illustrative peptide substrate separates into an N-terminal proteolytic fragment and a C-terminal proteolytic fragment. The four amino acid residues immediately N-terminal to the scissile bond in the illustrative peptide substrate forms the C-terminus of the N-terminal proteolytic fragment; and the four amino acid residues immediately C-terminal to the scissile bond in the illustrative peptide substrate forms the N-terminus of the C-terminal proteolytic fragment.

[0086] FIG. 3 illustrates a structural configuration of an exemplary activatable antibody (AA) composition comprising an antibody or a fragment thereof, a masking moiety (MM), and a release segment (RS).

[0087] FIG. 4 illustrates a structural configuration of an exemplary activatable antibody complex (AAC) composition with cross-masking occurring such that target binding by both antibodies or fragments thereof is attenuated in its uncleaved state, and target binding is increased upon cleavage of the release segment (RS) allowing the complex to disassemble. In this figure, the two antibodies or fragments thereof are referred to as the antibody domain 1 (ABD1) and antibody domain 2 (ABD2), respectively.

[0088] FIG. 5 illustrates a structural configuration of an exemplary activatable antibody complex (AAC) composition comprising two antibodies or fragments thereof, a masking moiety (MM), and a release segment (RS).

[0089] FIG. 6 illustrates a structural configuration of an exemplary activatable antibody complex (AAC) composition comprising four antibodies or fragments thereof, two masking moieties (MM) and three release segments (RS).

[0090] FIG. 7 illustrates a structural configuration of an exemplary activatable antibody composition (AA) comprising one antibody or antibody fragment (AB), two masking moieties (MM), and two release segments (RS).

[0091] FIG. 8 illustrates a structural configuration of an XTENylated Protease-Activated T-Cell Engager (XPAT). The illustrative XPAT comprises two binding moieties, each linked to an XTEN via a release segment.

[0092] FIG. 9 illustrates the results of mammalian protease cleavage of release segments having sequence similarities to a sequence found in collagen I. The cleavage site is identified by a star (★) with portions of the sequences identical to the collagen site underlined. A sequence engineered not to be recognized or cleaved by proteases that recognize the collagen-derived cleavage site is set forth as 818-NonClv (RSR-3058) and amino acids that vary from the collagen sequence are shown in black type.

### DETAILED DESCRIPTION

[0093] In various cancer therapy modalities, agents have been generated that are conditionally activatable in the tumor microenvironment. However, there remains a need for developing more accurate and robust methods for predicting whether administration of these therapies will actually lead to therapeutic responses and outcomes upon administration of prodrugs or other activatable compositions. It is recognized that there is a cascade of events that leads to metastatic growth of cancer cells. A central factor in these events is the interaction between cancer cells and their microenvironment through which the tumor cells proliferate, build new vessels, leave the primary tumor bed and finally enter and persist at secondary sites of metastatic tumor growth. The extracellular matrix (ECM) of the tumor microenvironment consists of a variety of macromolecules, including collagen and glycoproteins. While the basement membranes of the ECM are formed mostly by type IV collagen, type I and type III collagen are the most abundant proteins of the underlying interstitial matrix. In healthy tissue, the ECM undergoes constant remodeling, mediated mainly by matrix-metalloproteinases (MMP), and matrix degradation is balanced by protein formation. This controlled remodeling of the ECM becomes disrupted in cancer development and progression.

[0094] In the process of MMP-mediated ECM degradation, small fragments of ECM turnover products are generated and released into the bloodstream. Several studies have shown that serum levels of collagen degradation fragments are elevated in cancer patients compared to healthy controls. Bager et al. found levels of MMP-degraded collagen type I, III and IV (i.e., C1M, C3M and C4M, respectively, Cancer Biomark. 2015; 15:783-788) to be 1.5 to 6-fold higher in ovarian and breast cancer patients than in controls. In the present invention, it is demonstrated that cleavage of the ECM by MMPs results in a cleavage product that is highly similar to the MMP cleavage site in protease-cleavable linkers in XPATs. The data presented herein demonstrate that the protease cleavable linker employed in the XPATs of this invention are more efficiently cleaved than the ECM by purified MMPs. As such, it is shown that the presence of ECM peptides in cancer patients can serve as an indicator that the patients' tumors have a microenvironment that has the appropriate protease (e.g., MMP) activity that can cleave the protease-cleavable linker in an XPAT. In this manner, the presence of the ECM peptides in the sample of a cancer patient thereby predicts whether a given patient or tumor will be able to cleave the XPAT and hence result in treatment of the tumor. This allows for a personalized approach to determine whether an XPAT will be cleaved in a given tumor type by determining whether the subject that has said tumor type has elevated plasma levels of certain cleavage product(s) derived from the extracellular matrix.

[0095] Before the embodiments of the disclosure are described, it is to be understood that such embodiments are provided by way of example only, and that various alternatives to the embodiments of the disclosure described herein may be employed in practicing the invention. Numerous variations, changes, and substitutions will now occur to those skilled in the art without departing from the invention.

[0096] Unless otherwise defined, all technical and scientific terms used herein have the same meaning as commonly understood by one of ordinary skill in the art to which this invention belongs. Although methods and materials similar or equivalent to those described herein can be used in the practice or testing of the present invention, suitable methods and materials are described below. In case of conflict, the patent specification, including definitions, will control. In addition, the materials, methods, and examples are illustrative only and not intended to be limiting. Numerous variations, changes, and substitutions will now occur to those skilled in the art without departing from the invention.

### Definitions

[0097] In the context of the present application, the following terms have the meanings ascribed to them unless specified otherwise:

[0098] As used throughout the specification and claims, the terms “a”, “an” and “the” are generally used in the sense that they mean “at least one”, “at least a first”, “one or more” or “a plurality” of the referenced components or steps, except in instances wherein an upper limit is thereafter specifically stated. For example, a “cleavage sequence”, as used herein, means “at least a first cleavage sequence” but includes a plurality of cleavage sequences. The operable limits and parameters of combinations, as with the amounts of any single agent, will be known to those of ordinary skill in the art in light of the present disclosure.

[0099] The term “activatable,” as used herein with respect to a therapeutic agent, generally means that an activity or bioactivity of the therapeutic agent is capable of being enhanced upon activation, for example, via a physical, chemical or physiological process (e.g., enzymatic processes and metabolic processes).

[0100] As used herein, the term “activatable therapeutic agent,” generally refers to a therapeutic agent, of which an activity or bioactivity is capable of being enhanced upon activation, for example, via a physical, chemical or physiological process (e.g., enzymatic processes and metabolic processes). For example, the term “activatable therapeutic agent” may refer to a therapeutic agent in an inactive (or less active) state (at least inactive in one aspect) configured to be activated (i.e., in vitro, in vivo, or ex vivo) into an active (or more active) state (at least in the aspect that is inactive prior to activation). As another example, the term “activatable therapeutic agent” may refer to an active therapeutic agent (at least active in one aspect), of which an activity or bioactivity can be further enhanced (i.e., in vitro, in vivo, or ex vivo). Non-limiting examples of an activatable therapeutic agent include a prodrug, a probody, and a pro-moiety.

[0101] The terms “polypeptide”, “peptide”, and “protein” are used interchangeably herein to generally refer to polymers of amino acids of any length. The polymer may be linear or branched, it may comprise modified amino acids, and it may be interrupted by non-amino acids. The terms also encompass an amino acid polymer that has been modified, for example, by disulfide bond formation, glycosylation, lipidation, acetylation, phosphorylation, or any other manipulation, such as conjugation with a labeling component.

[0102] As used herein in the context of the structure of a polypeptide, “N-terminus” (or “amino terminus”) and “C-terminus” (or “carboxyl terminus”) generally refer to the extreme amino and carboxyl ends of the polypeptide, respectively.

[0103] The term “N-terminal end sequence,” as used herein with respect to a polypeptide or polynucleotide sequence of interest, generally means that no other amino acid or nucleotide residues precede the N-terminal end sequence in the polypeptide or polynucleotide sequence of interest at the N-terminal end. The term “C-terminal end sequence,” as used herein with respect to a polypeptide or polynucleotide sequence of interest, generally means that no other amino acid or nucleotide residues follows the C-terminal end sequence in the polypeptide or polynucleotide sequence of interest at the C-terminal end.

[0104] The terms “non-naturally occurring” and “non-natural” are used interchangeably herein. The term “non-naturally occurring” or “non-natural,” as used herein with respect to a therapeutic agent, generally means that the agent is not biologically derived in mammals (including but not limited to human). The term “non-naturally occurring” or “non-natural,” as applied to sequences and as used herein, means polypeptide or polynucleotide sequences that do not have a counterpart to, are not complementary to, or do not have a high degree of homology with a wild-type or naturally-occurring sequence found in a mammal. For example, a non-naturally occurring polypeptide or fragment may share no more than 99%, 98%, 95%, 90%, 80%, 70%, 60%, 50% or even less amino acid sequence identity as compared to a natural sequence when suitably aligned.

[0105] As used herein, the term “antibody” generally refers to an immunoglobulin molecule, or any fragment thereof, which is immunologically reactive with an antigen of interest. For example, an antibody fragment may retain the ability to bind its ligand yet have a smaller molecular size and be in a single-chain format. The term “antibody” is used herein in the broadest sense and encompasses various antibody structures, including but not limited to monoclonal antibodies, polyclonal antibodies, multispecific antibodies (e.g., bispecific antibodies), and antibody fragments so long as they exhibit the desired antigen-binding activity. The full-length antibodies may be for example monoclonal, recombinant, chimeric, deimmunized, humanized and human antibodies.

[0106] A “variant,” when applied to a biologically active protein is a protein with sequence homology to the native biologically active protein that retains at least a portion of the therapeutic and/or biological activity of the biologically active protein. For example, a variant protein may share at least 70%, 75%, 80%, 85%, 90%, 95%, 96%, 97%, 98% or 99% amino acid sequence identity compared with the reference biologically active protein. As used herein, the term “biologically active protein variant” includes proteins modified deliberately, as for example, by site directed mutagenesis, synthesis of the encoding gene, insertions, or accidentally through mutations and that retain activity.

[0107] The term “sequence variant” means polypeptides that have been modified compared to their native or original sequence by one or more amino acid insertions, deletions, or substitutions. Insertions may be located at either or both termini of the protein, and/or may be positioned within internal regions of the amino acid sequence. A non-limiting example is substitution of an amino acid in an XTEN with a different amino acid. In deletion variants, one or more amino acid residues in a polypeptide as described herein are removed. Deletion variants, therefore, include all fragments of a described polypeptide sequence. In substitution variants, one or more amino acid residues of a polypeptide are removed and replaced with alternative residues. In one aspect, the substitutions are conservative in nature and conservative substitutions of this type are well known in the art. In the context of an antibody or a biologically active polypeptide, a sequence variant would retain at least a portion of the binding affinity or biological activity, respectively, of the unmodified polypeptide.

[0108] The term “moiety” means a component of a larger composition or that is intended to be incorporated into a larger composition, such as a proteinaceous portion joined to a larger polypeptide as a contiguous or non-contiguous sequence. A moiety of a larger composition can confer a desired functionality. For example, an antibody fragment may retain the ability to bind its ligand yet have a smaller molecular size and be in a single-chain format. A masking moiety (including but not limited to an extended recombinant polypeptide (XTEN)) may confer the functionality of increasing molecular weight and/or half-life of a resulting larger composition with which the masking moiety is associated.

[0109] The terms “binding domain” and “binding moiety” are used interchangeably herein and each refer to a moiety having specific binding affinity to an antigen (such as an effector cell antigen, or a tumor-specific marker or an antigen of a target cell).

[0110] As used herein, a “release segment” or “RS” generally refers to a peptide with one or more cleavage sites in the sequence that can be recognized and cleaved by one or more mammalian enzymes (such as one or more proteases).

[0111] As used herein, a “peptide substrate” generally refers to an amino acid sequence recognized by an enzyme (such as a mammalian protease), leading to cleavage at a peptide bond (or the peptide bond) within the peptide substrate such that two consecutive amino acid residues connected by the peptide bond (or the scissile bond) prior to cleavage are separated upon cleavage. As used herein, a “scissile bond” generally refers to a peptide bond joining consecutive amino acids via an amide linkage that can be cleaved (or is cleaved) by an enzyme (such as a mammalian protease). For example, in the context of a peptide substrate, the scissile bond divides the peptide substrate into a C-terminal proteolytic fragment (or a C-terminal fragment) and an N-terminal proteolytic fragment (or an N-terminal fragment), where the C-terminal proteolytic fragment (or the C-terminal fragment) is N-terminal to the scissile bond in the peptide substrate and the N-terminal proteolytic fragment (or the N-terminal fragment) is C-terminal to the scissile bond in the peptide substrate. For example, the (putative) scissile bond of each cleavage sequence listed in Table A is indicated by a hyphen (-).

[0112] As used herein, the term “scissile bond” generally refers to a peptide bond between two amino acids which is capable of being cleaved by one or more proteases.

[0113] As used herein, the term “mammalian protease” generally means a protease that normally exists in the body fluids, cells, tissues, and may be found in higher levels in certain target tissues or cells, e.g., in diseased tissues (e.g., tumor) of a mammal.

[0114] The term “within”, when referring to a first polypeptide being linked to a second polypeptide, encompasses linking or fusion of an additional component that connects the N-terminus of the first or second polypeptide to the C-terminus of the second or first polypeptide, respectively, as well as insertion of the first polypeptide into the sequence of the second polypeptide. For example, when an RS component is linked “within” an recombinant polypeptide, the RS may be linked to the N-terminus, the C-terminus, or may be inserted between any two amino acids of an XTEN polypeptide.

[0115] The term “linked directly,” as used herein in the context of a therapeutic agent, generally refers to a structure in which a moiety is connected with or attached to another moiety without an intervening tether. The term “linked indirectly,” as used herein in the context of a therapeutic agent, generally refers to a structure in which a moiety of the therapeutic agent is connected with, or attached to, another moiety of the therapeutic agent via an intervening tether. The terms “link,” “linked,” and “linking,” as used herein in the context of a therapeutic agent, generally includes both covalent and non-covalent attachment of a moiety of the therapeutic agent to another moiety of the therapeutic agent.

[0116] “Activity” (such as “bioactivity”) as applied to form(s) of a composition provided herein, generally refers to an action or effect, including but not limited to receptor binding, antagonist activity, agonist activity, a cellular or physiologic response, cell lysis, cell death, or an effect generally known in the art for the effector component of the composition, whether measured by an in vitro, ex vivo or in vivo assay or a clinical effect.

[0117] “Effector cell”, as used herein, includes any eukaryotic cells capable of conferring an effect on a target cell. For example, an effect cell can induce loss of membrane integrity, pyknosis, karyorrhexis, apoptosis, lysis, and/or death of a target cell. In another example, an effector cell can induce division, growth, differentiation of a target cell or otherwise altering signal transduction of a target cell.

[0118] An “effector cell antigen” refers to molecules expressed by an effector cell, including without limitation cell surface molecules such as proteins, glycoproteins or lipoproteins. An effector cell antigen can serve as the binding counterpart of a binding moiety of the subject recombinant polypeptide.

[0119] As used herein, the term “ELISA” refers to an enzyme-linked immunosorbent assay as described herein or as otherwise known in the art.

[0120] A “host cell” generally includes an individual cell or cell culture which can be or has been a recipient for the subject vectors into which exogenous nucleic acid has been introduced, such as those described herein. Host cells include progeny of a single host cell. The progeny may not necessarily be completely identical (in morphology or in genomic of total DNA complement) to the original parent cell due to natural, accidental, or deliberate mutation. A host cell includes cells transfected in vivo with a vector of this disclosure.

[0121] The term “isolated”, when used to describe the various polypeptides disclosed herein, generally means polypeptide that has been identified and separated and/or recovered from a component of its natural environment or from a more complex mixture (such as during protein purification). Contaminant components of its natural environment are materials that would typically interfere with diagnostic or therapeutic uses for the polypeptide, and may include enzymes, hormones, and other proteinaceous or non-proteinaceous solutes. As is apparent to those of skill in the art, a non-naturally occurring polynucleotide, peptide, polypeptide, protein, antibody, or fragments thereof, does not require “isolation” to distinguish it from its naturally occurring counterpart. In addition, a “concentrated”, “separated” or “diluted” polynucleotide, peptide, polypeptide, protein, antibody, or fragments thereof, is distinguishable from its naturally occurring counterpart in that the concentration or number of molecules per volume is generally greater than that of its naturally occurring counterpart. In general, a polypeptide made by recombinant means and expressed in a host cell is considered to be “isolated.”

[0122] An “isolated nucleic acid” is a nucleic acid molecule that is identified and separated from at least one contaminant nucleic acid molecule with which it is ordinarily associated in the natural source of the polypeptide-encoding nucleic acid. For example, an isolated polypeptide-encoding nucleic acid molecule is other than in the form or setting in which it is found in nature. Isolated polypeptide-encoding nucleic acid molecules therefore are distinguished from the specific polypeptide-encoding nucleic acid molecule as it exists in natural cells. However, an isolated polypeptide-encoding nucleic acid molecule includes polypeptide-encoding nucleic acid molecules contained in cells that ordinarily express the polypeptide where, for example, the nucleic acid molecule is in a chromosomal or extra-chromosomal location different from that of natural cells.

[0123] A “chimeric” protein or polypeptide contains at least one fusion polypeptide comprising at least one region in a different position in the sequence than that which occurs in nature. The regions may normally exist in separate proteins and are brought together in the fusion polypeptide; or they may normally exist in the same protein but are placed in a new arrangement in the fusion polypeptide. A chimeric protein may be created, for example, by chemical synthesis, or by recombinantly creating and translating a polynucleotide in which the peptide regions are encoded in the desired relationship.

[0124] The terms “fused” and “fusion” are used interchangeably herein, and refers to the joining together of two or more peptide or polypeptide sequences by recombinant means. A “fusion protein” or “chimeric protein” comprises a first amino acid sequence linked to a second amino acid sequence with which it is not naturally linked in nature.

[0125] “Uncleaved” and “uncleaved state” are used interchangeably herein, and refers to a polypeptide that has not been cleaved or digested by a protease such that the polypeptide remains intact.

[0126] “XTENylated” is used to denote a peptide or polypeptide that has been modified by the linking or fusion of one or more XTEN polypeptides (described, below) to the peptide or polypeptide, whether by recombinant or chemical cross-linking means.

[0127] “Crosslinking,” and “conjugating,” are used interchangeably herein, and refer to the covalent joining of two different molecules by a chemical reaction. The crosslinking can occur in one or more chemical reactions, as known in the art.

[0128] In the context of polypeptides, a “linear sequence” or a “sequence” is an order of amino acids in a polypeptide in an amino to carboxyl terminus (N- to C-terminus) direction in which residues that neighbor each other in the sequence are contiguous in the primary structure of the polypeptide. A “partial sequence” is a linear sequence of part of a polypeptide that is known to comprise additional residues in one or both directions.

[0129] “Heterologous” means derived from a genotypically distinct entity from the rest of the entity to which it is being compared. For example, a glycine rich sequence removed from its native coding sequence and operatively linked to a coding sequence other than the native sequence is a heterologous glycine rich sequence. The term “heterologous” as applied to a polynucleotide, a polypeptide, means that the polynucleotide or polypeptide is derived from a genotypically distinct entity from that of the rest of the entity to which it is being compared.

[0130] The terms “polynucleotides”, “nucleic acids”, “nucleotides” and “oligonucleotides” are used interchangeably. They refer to nucleotides of any length, encompassing a singular nucleic acid as well as plural nucleic acids, either deoxyribonucleotides or ribonucleotides, or analogs thereof. Polynucleotides may have any three-dimensional structure, and may perform any function, known or unknown. The following are non-limiting examples of polynucleotides: coding or non-coding regions of a gene or gene fragment, loci (locus) defined from linkage analysis, exons, introns, messenger RNA (mRNA), transfer RNA, ribosomal RNA, ribozymes, cDNA, recombinant polynucleotides, branched polynucleotides, plasmids, vectors, isolated DNA of any sequence, isolated RNA of any sequence, nucleic acid probes, and primers. A polynucleotide may comprise modified nucleotides, such as methylated nucleotides and nucleotide analogs. If present, modifications to the nucleotide structure may be imparted before or after assembly of the polymer. The sequence of nucleotides may be interrupted by non-nucleotide components. A polynucleotide may be further modified after polymerization, such as by conjugation with a labeling component.

[0131] As used herein, the term “reporter polypeptide(s)” refers to human polypeptide(s) or protein(s) that, under certain circumstances, can be acted upon to generate a detectable signal (such as being enzymatically digested to produce detectable peptide sequence(s)) that can be identified and characterized from outside of a cell, organ, tissue, or body of a subject. For example, a “reporter polypeptide” can be a human protein capable of being cleaved by protease(s) that are also capable of cleaving activatable therapeutic agent(s) (such as described hereinbelow) comprising peptide substrate. Non-limiting examples of peptide substrates include those described hereinbelow in section “Release Segments (RS).”

[0132] The term “complement of a polynucleotide” denotes a polynucleotide molecule having a complementary base sequence and reverse orientation as compared to a reference sequence, such that it could hybridize with a reference sequence with complete fidelity.

[0133] “Recombinant” as applied to a polynucleotide means that the polynucleotide is the product of various combinations of recombination steps which may include cloning, restriction and/or ligation steps, and other procedures that result in expression of a recombinant protein in a host cell.

[0134] The terms “gene” and “gene fragment” are used interchangeably herein. They refer to a polynucleotide containing at least one open reading frame that is capable of encoding a particular protein after being transcribed and translated. A gene or gene fragment may be genomic or cDNA, as long as the polynucleotide contains at least one open reading frame, which may cover the entire coding region or a segment thereof. A “fusion gene” is a gene composed of at least two heterologous polynucleotides that are linked together.

[0135] The term “homology” or “homologous” or “identity” interchangably refers to sequence similarity between two or more polynucleotide sequences or between two or more polypeptide sequences. When using a program such as BestFit to determine sequence identity, similarity or homology between two different amino acid sequences, the default settings may be used, or an appropriate scoring matrix, such as blosum45 or blosum80, may be selected to optimize identity, similarity or homology scores. Preferably, polynucleotides that are homologous are those which hybridize under stringent conditions as defined herein and have at least 70%, preferably at least 80%, more preferably at least 90%, more preferably 95%, more preferably 97%, more preferably 98%, and even more preferably 99% sequence identity, when optimally aligned, compared to those sequences. Polypeptides that are homologous preferably have sequence identities that are at least 70%, preferably at least 80%, even more preferably at least 90%, even more preferably at least 95-99% identical when optimally aligned over sequences of comparable length.

[0136] The terms “percent identity,” percentage of sequence identity,” and “% identity,” as applied to polynucleotide sequences, refer to the percentage of residue matches between at least two polynucleotide sequences aligned using a standardized algorithm. Such an algorithm may insert, in a standardized and reproducible way, gaps in the sequences being compared in order to optimize alignment between two sequences, and therefore achieve a more meaningful comparison of the two sequences. Percent identity may be measured over the length of an entire defined polynucleotide sequence, or may be measured over a shorter length, for example, over the length of a fragment taken from a larger, defined polynucleotide sequence, for instance, a fragment of at least 45, at least 60, at least 90, at least 120, at least 150, at least 210 or at least 450 contiguous residues. Such lengths are exemplary only, and it is understood that any fragment length supported by the sequences shown herein, in the tables, figures or Sequence Listing, may be used to describe a length over which percentage identity may be measured. The percentage of sequence identity is calculated by comparing two optimally aligned sequences over the window of comparison, determining the number of matched positions (at which identical residues occur in both polypeptide sequences), dividing the number of matched positions by the total number of positions in the window of comparison (e.g., the window size), and multiplying the result by 100 to yield the percentage of sequence identity. When sequences of different length are to be compared, the shortest sequence defines the length of the window of comparison. Conservative substitutions are not considered when calculating sequence identity.

[0137] “Percent (%) sequence identity” and “percent (%) identity” with respect to the polypeptide sequences identified herein, is defined as the percentage of amino acid residues in a query sequence that are identical with the amino acid residues of a second, reference polypeptide sequence of comparable length or a portion thereof, after aligning the sequences and introducing gaps, if necessary, to achieve the maximum percent sequence identity, and not considering any conservative substitutions as part of the sequence identity, thereby resulting in optimal alignment. Alignment for purposes of determining percent amino acid sequence identity can be achieved in various ways that are within the skill in the art, for instance, using publicly available computer software such as BLAST, BLAST-2, ALIGN or Megalign (DNASTAR) software. Those skilled in the art can determine appropriate parameters for measuring alignment, including any algorithms needed to achieve optimal alignment over the full length of the sequences being compared. Percent identity may be measured over the length of an entire defined polypeptide sequence, or may be measured over a shorter length, for example, over the length of a fragment taken from a larger, defined polypeptide sequence, for instance, a fragment of at least 15, at least 20, at least 30, at least 40, at least 50, at least 70 or at least 150 contiguous residues. Such lengths are exemplary only, and it is understood that any fragment length supported by the sequences shown herein, in the tables, figures or Sequence Listing, may be used to describe a length over which percentage identity may be measured.

[0138] The term “expression” as used herein refers to a process by which a polynucleotide produces a gene product, for example, an RNA or a polypeptide. It includes without limitation transcription ofthe polynucleotide into messenger RNA (mRNA), transfer RNA (tRNA), small hairpin RNA (shRNA), small interfering RNA (siRNA) or any other RNA product, and the translation of an mRNA into a polypeptide. Expression produces a “gene product.” As used herein, a gene product can be either a nucleic acid, e.g., a messenger RNA produced by transcription of a gene, or a polypeptide which is translated from a transcript. Gene products described herein further include nucleic acids with post transcriptional modifications, e.g., polyadenylation or splicing, or polypeptides with post translational modifications, e.g., methylation, glycosylation, the addition of lipids, association with other protein subunits, or proteolytic cleavage.

[0139] A “vector” or “expression vector” are used interchangeably and refers to a nucleic acid molecule, preferably self-replicating in an appropriate host, which transfers an inserted nucleic acid molecule into and/or between host cells. The term includes vectors that function primarily for insertion of DNA or RNA into a cell, replication of vectors that function primarily for the replication of DNA or RNA, and expression vectors that function for transcription and/or translation of the DNA or RNA. Also included are vectors that provide more than one of the above functions. An “expression vector” is a polynucleotide which, when introduced into an appropriate host cell, can be transcribed and translated into a polypeptide(s). An “expression system” usually connotes a suitable host cell comprised of an expression vector that can function to yield a desired expression product.

[0140] The terms “t_{1/2}”, “half-life”, “terminal half-life”, “elimination half-life” and “circulating half-life” are used interchangeably herein and, as used herein, generally means the terminal half-life calculated as ln(2)/Kₑₗ. Kₑₗ is the terminal elimination rate constant calculated by linear regression of the terminal linear portion of the log concentration vs. time curve. Half-life typically refers to the time required for half the quantity of an administered substance deposited in a living organism to be metabolized or eliminated by normal biological processes. When a clearance curve of a given polypeptide is constructed as a function of time, the curve is usually biphasic with a rapid α-phase and longer beta-phase. The typical beta-phase half-life of a human antibody in humans is 21 days. Half-life can be measured using timed samples from any body fluid, but is most typically measured in serum or plasma samples.

[0141] The term “molecular weight” generally refers to the sum of atomic weights of the constituent atoms in a molecule. Molecular weight can be determined theoretically by summing the atomic masses of the constituent atoms in a molecule. When applied in the context of a polypeptide, the molecular weight is calculated by adding, based on amino acid composition, the molecular weight of each type of amino acid in the composition or by estimation from comparison to molecular weight standards in an SDS electrophoresis gel. The calculated molecular weight of a molecule can differ from the apparent molecular weight of a molecule, which generally refers to the molecular weight of a molecule as determined by one or more analytical techniques. “Apparent molecular weight factor” and “apparent molecular weight” are related terms and when used in the context of a polypeptide, the terms refer to a measure of the relative increase or decrease in apparent molecular weight exhibited by a particular amino acid or polypeptide sequence. The apparent molecular weight can be determined, for example, using size exclusion chromatography (SEC) or similar methods by comparing to globular protein standards, as measured in “apparent kD” units. The apparent molecular weight factor is the ratio between the apparent molecular weight and the “molecular weight”; the latter is calculated by adding, based on amino acid composition as described above, or by estimation from comparison to molecular weight standards in an SDS electrophoresis gel. The determination of apparent molecular weight and apparent molecular weight factor is described inter alia in U.S. Pat. No. 8,673,860.

[0142] The terms “hydrodynamic radius” or “Stokes radius” is the effective radius (Rh in nm) of a molecule in a solution measured by assuming that it is a body moving through the solution and resisted by the solution's viscosity. In the embodiments of the disclosure, the hydrodynamic radius measurements of the XTEN polypeptides correlate with the “apparent molecular weight factor” which is a more intuitive measure. The “hydrodynamic radius” of a protein affects its rate of diffusion in aqueous solution as well as its ability to migrate in gels of macromolecules. The hydrodynamic radius of a protein is determined by its molecular weight as well as by its structure, including shape and compactness. Methods for determining the hydrodynamic radius are well known in the art, such as by the use of size exclusion chromatography (SEC), as described inter alia in U.S. Pat. Nos. 6,406,632 and 7,294,513. Most proteins have globular structure, which is the most compact three-dimensional structure a protein can have with the smallest hydrodynamic radius. Some proteins adopt a random and open, unstructured, or ‘linear’ conformation and as a result have a much larger hydrodynamic radius compared to typical globular proteins of similar molecular weight.

[0143] “Physiological conditions” refers to a set of conditions in a living host as well as in vitro conditions, including temperature, salt concentration, pH, that mimic those conditions of a living subject. A host of physiologically relevant conditions for use in in vitro assays have been established. Generally, a physiological buffer contains a physiological concentration of salt and is adjusted to a neutral pH ranging from about 6.5 to about 7.8, and preferably from about 7.0 to about 7.5. A variety of physiological buffers are listed in Sambrook et al. (2001). Physiologically relevant temperature ranges from about 25° C. to about 38° C., and preferably from about 35° C. to about 37° C.

[0144] The term “binding moiety” is used herein in the broadest sense, and is specifically intended to include the categories of cytokines, cell receptors, antibodies or antibody fragments that have specific affinity for an antigen or ligand such as cell-surface receptors, target cell markers, or antigens or glycoproteins, oligonucleotides, enzymatic substrates, antigenic determinants, or binding sites that may be present in or on the surface of a tissue or cell.

[0145] The term “monoclonal antibody” as used herein refers to an antibody obtained from a population of substantially homogeneous antibodies, e.g., the individual antibodies comprising the population are identical and/or bind the same epitope, except for possible variant antibodies, e.g., containing naturally occurring mutations or arising during production of a monoclonal antibody preparation, such variants generally being present in minor amounts. In contrast to polyclonal antibody preparations, which typically include different antibodies directed against different determinants (epitopes), each monoclonal antibody of a monoclonal antibody preparation is directed against a single determinant on an antigen. Thus, the modifier “monoclonal” indicates the character of the antibody as being obtained from a substantially homogeneous population of antibodies, and is not to be construed as requiring production of the antibody by any particular method. For example, the monoclonal antibodies to be used in accordance with the present invention may be made by a variety of techniques, including but not limited to the hybridoma method, recombinant DNA methods, phage-display methods, and methods utilizing transgenic animals containing all or part of the human immunoglobulin loci, such methods and other exemplary methods for making monoclonal antibodies being known in the art or described herein.

[0146] An “antibody fragment,” as used herein, generally refers to a molecule other than an intact antibody that comprises a portion of an intact antibody and that binds the antigen to which the intact antibody binds. Examples of antibody fragments include but are not limited to Fv, Fab, Fab′, Fab′-SH, F(ab′)2, diabodies, single chain diabodies, linear antibodies, nanobodies (also known as single domain antibodies (including single domain camelid antibodies) or V_{HH}) single-chain variable fragment (scFv) antibody molecules, and multispecific antibodies formed from antibody fragments.

[0147] “scFv” or “single chain fragment variable” are used interchangeably herein to refer to an antibody fragment format comprising regions of variable heavy (“VH”) and variable light (“VL”) chains or two copies of a VH or VL chain, which are joined together by a short flexible peptide linker. The scFv is not actually a fragment of an antibody, but is a fusion protein of the variable regions of the heavy (VH) and light chains (VL) of immunoglobulins, and can be easily expressed in functional form in E. coli or mammalian cell(s) in either N- to C-terminus orientation; VL-VH or VH-VL.

[0148] The terms “antigen”, “target cell marker” and “ligand” are used interchangeably herein to refer to the structure or binding determinant that a binding moiety, an antibody, antibody fragment or an antibody fragment-based molecule binds to or has binding specificity against.

[0149] The term “epitope” refers to the particular site on an antigen molecule to which an antibody, antibody fragment, or binding moiety binds. An epitope is a ligand of an antibody, antibody fragment, or a binding moiety.

[0150] As used herein, “CD3” or “cluster of differentiation 3” means the T cell surface antigen CD3 complex, which includes in individual form or independently combined form all known CD3 subunits, for example CD3 epsilon, CD3 delta, CD3 gamma, CD3 zeta, CD3 alpha and CD3 beta. The extracellular domains of CD3 epsilon, gamma and delta contain an immunoglobulin-like domain, so are therefore considered part of the immunoglobulin superfamily.

[0151] The terms “specific binding” or “specifically bind” or “binding specificity” are used interchangeably herein to refer to the high degree of binding affinity of a binding moiety to its corresponding target. Typically, specific binding as measured by one or more of the assays disclosed herein would have a dissociation constant or K_{d} of less than about 10⁻⁶ M (e.g, of 10⁻⁷ M to 10⁻¹² M).

[0152] The term “affinity,” as used herein, generally refers to the strength of the sum total of noncovalent interactions between a single binding site of a molecule (e.g., an antibody) and its binding partner (e.g., an antigen). Unless indicated otherwise, as used herein, “binding affinity” refers to intrinsic binding affinity which reflects a 1:1 interaction between members of a binding pair (e.g., antibody and antigen). The affinity of a molecule X for its partner Y can generally be represented by the dissociation constant (K_{d}). As used herein “a greater binding affinity” or “increased binding affinity” means a lower K_{d} value; e.g., 1×10⁻⁹ M is a greater binding affinity than 1×10⁻⁸ M, while a “lower binding affinity” means a greater K_{d} value; e.g., 1×10⁻⁷ M is a lower binding affinity than 1×10⁻⁸ M.

[0153] “Inhibition constant”, or “Kᵢ”, are used interchangeably and mean the dissociation constant of the enzyme-inhibitor complex, or the reciprocal of the binding affinity of the inhibitor to the enzyme.

[0154] “Dissociation constant”, or “K_{d}”, are used interchangeably and mean the affinity between a ligand “L” and a protein “P”; e.g., how tightly a ligand binds to a particular protein. It can be calculated using the formula K_{d}=[L] [P]/[LP], where [P], [L] and [LP] represent molar concentrations of the protein, ligand and complex, respectively. The term “kₒₙ”, as used herein, is intended to refer to the on rate constant for association of an antibody to the antigen to form the antibody/antigen complex as is known in the art. The term “k_{off}”, as used herein, is intended to refer to the off rate constant for dissociation of an antibody from the antibody/antigen complex as is known in the art. Techniques such as flow cytometry or surface plasmon resonance can be used to detect binding events. The assays may comprise soluble antigens or receptor molecules, or may determine the binding to cell-expressed receptors. Such assays may include cell-based assays, including assays for proliferation, cell death, apoptosis and cell migration. The binding affinity of the subject compositions for the target ligands can be assayed using binding or competitive binding assays, such as Biacore assays with chip-bound receptors or binding proteins or ELISA assays, as described in U.S. Pat. No. 5,534,617, assays described in the Examples herein, radio-receptor assays, reporter gene activity assays, or other assays known in the art. For example, an exemplary reporter gene activity assay can be based on genetically engineered cell(s), generated by stably introducing relevant gene(s) for the receptor(s)-of-interest and the signaling pathway(s)-of-interest, such that binding to the engineered receptor triggers a signaling cascade leading to the activation of the engineered gene pathway with a subsequent production of signature polypeptide(s) (such as an enzyme). The binding affinity constant can then be determined using standard methods, such as Scatchard analysis, as described by van Zoelen, et al., Trends Pharmacol Sciences (1998) 19)12):487, or other methods known in the art.

[0155] A “target cell marker” refers to a molecule expressed by a target cell including but not limited to cell-surface receptors, cytokine receptors, antigens, tumor-associated antigens, glycoproteins, oligonucleotides, enzymatic substrates, antigenic determinants, or binding sites that may be present in the on the surface of a target tissue or cell that may serve as ligands for a binding moiety. Non-limiting examples of target cell markers include the target markers of Table 6.

[0156] The term “target tissue” generally refers to a tissue that is the cause of or is part of a disease condition such as, but not limited to cancer or inflammatory conditions. Sources of diseased target tissue include a body organ, a tumor, a cancerous cell or population of cancerous cells or cells that form a matrix or are found in association with a population of cancerous cells, bone, skin, cells that produce cytokines or factors contributing to a disease condition.

[0157] The term “target cell” generally refers to a cell that has the ligand of a binding moiety, an antibody or antibody fragment of the subject compositions and is associated with or causes a disease or pathologic condition, including cancer cells, tumor cells, and inflammatory cells. The ligand of a target cell is referred to herein as a “target cell marker” or “target cell antigen” and includes, but is not limited to, cell surface receptors or antigens, cytokines, cytokine receptors, MHC proteins, and cytosol proteins or peptides that are exogenously presented. As used herein, “target cell” would not include an effector cell.

[0158] As used herein, an “immunoassay” generally refers to a biochemical test that measures the presence or concentration of a substance in a sample, such as a biological sample, using the reaction of an antibody (or a fragment thereof) to its cognate antigen, for example the specific binding of an antibody to a protein. Both the presence of the antigen or the amount of the antigen present can be measured.

[0159] As used herein, a “mass spectrometer (MS)” generally refers to an apparatus that includes a means for ionizing molecules and detecting charged molecules. A mass spectrum generated by a mass spectrometer can be used to identify molecule(s) of interest based on the molar mass. Non-limiting examples of “mass spectrometer (MS)” include all combinations with liquid chromatography (LC), such as liquid chromatography with mass spectrometry (LC-MS), liquid chromatography with tandem mass spectrometry (LC-MS/MS), etc.

[0160] As used herein, the terms “treatment” or “treating,” or “palliating” or “ameliorating” are used interchangeably herein. These terms generally refer to an approach for obtaining beneficial or desired results including but not limited to a therapeutic benefit and/or a prophylactic benefit. By therapeutic benefit is meant eradication or amelioration of the underlying disorder being treated. Also, a therapeutic benefit is achieved with the eradication or amelioration of one or more of the physiological symptoms or improvement in one or more clinical parameters associated with the underlying disorder such that an improvement is observed in the subject, notwithstanding that the subject may still be afflicted with the underlying disorder. For prophylactic benefit, the compositions may be administered to a subject at risk of developing a particular disease, or to a subject reporting one or more of the physiological symptoms of a disease, even though a diagnosis of this disease may not have been made.

[0161] A “therapeutic effect” or “therapeutic benefit,” as used herein, generally refers to a physiologic effect, including but not limited to the mitigation, amelioration, or prevention of disease or an improvement in one or more clinical parameters associated with the underlying disorder in humans or other animals, or to otherwise enhance physical or mental wellbeing of humans or animals, resulting from administration of a polypeptide of the disclosure other than the ability to induce the production of an antibody against an antigenic epitope possessed by the biologically active protein. For prophylactic benefit, the compositions may be administered to a subject at risk of developing a particular disease, a recurrence of a former disease, condition or symptom of the disease, or to a subject reporting one or more of the physiological symptoms of a disease, even though a diagnosis of this disease may not have been made.

[0162] The terms “therapeutically effective amount” and “therapeutically effective dose”, as used herein, generally refer to an amount of a drug or a biologically active protein, either alone or as a part of a polypeptide composition, that is capable of having any detectable, beneficial effect on any symptom, aspect, measured parameter or characteristics of a disease state or condition when administered in one or repeated doses to a subject. Such effect need not be absolute to be beneficial. Determination of a therapeutically effective amount is well within the capability of those skilled in the art, especially in light of the detailed disclosure provided herein.

[0163] The term “equivalent molar dose” generally means that the amounts of materials administered to a subject have an equivalent amount of moles, based on the molecular weight of the material used in the dose.

[0164] The term “therapeutically effective and non-toxic dose,” as used herein, generally refers to a tolerable dose of the compositions as defined herein that is high enough to cause depletion of tumor or cancer cells, tumor elimination, tumor shrinkage or stabilization of disease without or essentially without major toxic effects in the subject. Such therapeutically effective and non-toxic doses may be determined by dose escalation studies described in the art and should be below the dose inducing severe adverse side effects.

[0165] The terms “cancer” and “cancerous” refer to or describe the physiological condition in mammals that is typically characterized by unregulated cell growth/proliferation.

### Compositions

### Therapeutic Agents

[0166] Provided herein, in some embodiments, is a therapeutic agent (or an activatable therapeutic agent, or a non-natural, activatable therapeutic agent) that comprises a release segment (RS) (such as one described hereinbelow in the RELEASE SEGMENTS section or described anywhere else herein) linked, directly or indirectly, to a biologically active moiety (BM) (such as one described hereinbelow in the BIOLOGICALLY ACTIVE MOIETIES section or described anywhere else herein). The biologically active moiety (BM) can be a biologically active peptide (BP) (such as one described hereinbelow in the BIOLOGICALLY ACTIVE MOIETIES section or described anywhere else herein). The release segment (RS) can comprise a peptide substrate (such as one described hereinbelow in the RELEASE SEGMENTS section or described anywhere else herein) susceptible to cleavage by a mammalian protease (such as one described hereinbelow or described anywhere else herein) at a scissile bond. The therapeutic agent can further comprise a masking moiety (MM) (such as one described hereinbelow in the MASKING MOIETIES section or described anywhere else herein) linked, directly or indirectly, to the release segment (RS). A bioactivity of the therapeutic agent can be enhanced upon cleavage of the peptide substrate by the mammalian protease (thereby releasing the masking moiety). The therapeutic agent, in an uncleaved state, can have a structural arrangement from N-terminus to C-terminus of BM-RS-MM or MM-RS-BM. Upon cleavage of the release segment (RS), the masking moiety (MM) can be released from the therapeutic agent. The masking moiety (MM) can comprise an extended recombinant polypeptide (XTEN). The therapeutic agent, in an uncleaved state, can have a structural arrangement from N-terminus to C-terminus of BM-RS-XTEN or XTEN-RS-BM.

[0167] In some embodiments of the therapeutic agent (or the activatable therapeutic agent, or the non-natural, activatable therapeutic agent), where the release segment (RS) can be a first release segment (RS1), where the peptide substrate (of the RS1) can be a first peptide substrate, and where the scissile bond (of the RS1) can be a first scissile bond, the therapeutic agent can further comprise a second release segment (RS2) (such as one described hereinbelow in the RELEASE SEGMENTS section or described anywhere else herein) linked, directly or indirectly, to the biologically active moiety (BM). The second release segment (RS2) can comprise a second peptide substrate (such as one described hereinbelow in the RELEASE SEGMENTS section or described anywhere else herein) for cleavage by a mammalian protease (such as one described hereinbelow or described anywhere else herein) at a second scissile bond. A bioactivity of the therapeutic agent can be enhanced upon cleavage of one or both of the first and second peptide substrate by the mammalian protease (thereby releasing one or both of the first and second masking moieties). The mammalian protease for cleavage of the second release segment (RS2) can be identical to the mammalian protease for cleavage of the first release segment (RS1). The mammalian protease for cleavage of the second release segment (RS2) can be different from the mammalian protease for cleavage of the first release segment (RS1). The second release segment (RS2) can have an amino acid sequence identical to that of the first release segment (RS1). The second release segment (RS2) can have an amino acid sequence different from that of the first release segment (RS1). In some embodiments, the scissile bond (or the first scissile bond, or the second scissile bond) is not immediately C-terminal to a methionine residue. In some embodiments, the first scissile bond is not immediately C-terminal to a methionine residue. In some embodiments, the second scissile bond is not immediately C-terminal to a methionine residue.

[0168] In some embodiments of the therapeutic agent (or the activatable therapeutic agent, or the non-natural, activatable therapeutic agent), where the masking moiety (MM) can be a first masking moiety (MM1), the therapeutic agent can further comprise a second masking moiety (MM2) (such as one described hereinbelow in the MASKING MOIETIES section or described anywhere else herein) linked, directly or indirectly, to the second release segment (RS2). The therapeutic agent, in an uncleaved state, can have a structural arrangement from N-terminus to C-terminus of MM1-RS1-BM-RS2-MM2, MM1-RS2-BM-RS1-MM2, MM2-RS1-BM-RS2-MM1, or MM2-RS2-BM-RS1-MM1. Upon cleavage of the second release segment (RS2), the second masking moiety (MM2) can be released from the therapeutic agent. The first masking moiety (MM1) can comprise a first extended recombinant polypeptide (XTEN1). The second masking moiety (MM2) can comprise a second extended recombinant polypeptide (XTEN2). The therapeutic agent, in an uncleaved state, can have a structural arrangement from N-terminus to C-terminus of XTEN1-RS1-BP-RS2-XTEN2, XTEN1-RS2-BP-RS1-XTEN2, XTEN2-RS1-BP-RS2-XTEN1, or XTEN2-RS2-BP-RS1-XTEN1.

[0169] In some embodiments of the therapeutic agent (or the activatable therapeutic agent, or the non-natural, activatable therapeutic agent), the therapeutic agent can comprise a fusion polypeptide (e.g., a recombinant fusion protein) or conjugate (e.g., linked by chemical conjugation). In some embodiments, the therapeutic agent can be configured for activation at or in proximity to a target tissue or cell (such as one described hereinbelow in the TARGET TISSUES OR CELLS section or described anywhere else herein) in a subject. The therapeutic agent can be an anti-cancer agent (such as an activatable anti-cancer agent, or a non-natural, activatable anti-cancer agent). The therapeutic agent can be configured for activation by one or more mammalian proteases (such as one or any combination of those described herein).

[0170] In some embodiments of the therapeutic agent (or the activatable therapeutic agent, or the non-natural, activatable therapeutic agent), the therapeutic agent can comprise a recombinant polypeptide. The recombinant polypeptide can comprise the biologically active peptide (BP) and the release segment (RS). The recombinant polypeptide can comprise the biologically active peptide (BP), the release segment (RS), and the masking moiety (MM). The recombinant polypeptide, in an uncleaved state, can have a structural arrangement from N-terminus to C-terminus of BP-RS-MM or MM-RS-BP. The recombinant polypeptide can comprise the biologically active peptide (BP), the first release segment (RS1), and the second release segment (RS2). The recombinant polypeptide can comprise the biologically active peptide (BP), the first release segment (RS1), the second release segment (RS2), the first masking moiety (MM1), and the second masking moiety (MM2). The recombinant polypeptide, in an uncleaved state, can have a structural arrangement from N-terminus to C-terminus of MM1-RS1-BP-RS2-MM2, MM1-RS2-BP-RS1-MM2, MM2-RS1-BP-RS2-MM1, or MM2-RS2-BP-RS1-MM1. The recombinant polypeptide can comprise the biologically active peptide (BP), the first release segment (RS1), the second release segment (RS2), the first extended recombinant polypeptide (XTEN1), and the second extended recombinant polypeptide (XTEN2). The recombinant polypeptide, in an uncleaved state, can have a structural arrangement from N-terminus to C-terminus of XTEN1-RS1-BP-RS2-XTEN2, XTEN1-RS2-BP-RS1-XTEN2, XTEN2-RS1-BP-RS2-XTEN1, or XTEN2-RS2-BP-RS1-XTEN1.

### Release Segments (RS)

[0171] In some embodiments of the therapeutic agent (or the activatable therapeutic agent, or the non-natural, activatable therapeutic agent), the release segment (RS) (or the first release segment (RS1), or the second release segment (RS2), can (each independently) comprise a peptide substrate susceptible to cleavage by a mammalian protease at a scissile bond. The release segment (RS) (or the first release segment (RS1), or the second release segment (RS2)) can (each independently) be cleaved when in proximity to a target tissue or cell (such as one described hereinbelow in the TARGET TISSUES OR CELLS section or described anywhere else herein), where the target tissue or cell can produce a mammalian protease (such as one described hereinbelow in the TARGET TISSUES OR CELLS section or described anywhere else herein) for which the release segment (RS) (or the first release segment (RS1), or the second release segment (RS2)) is a peptide substrate.

[0172] In some embodiments of the therapeutic agent (or the activatable therapeutic agent, or the non-natural, activatable therapeutic agent), the peptide substrate (or the first peptide substrate, or the second peptide substrate) can have at most four, or at most three, or at most two, or at most one amino acid substitution(s) with respect to a cleavage sequence (such as one set forth in Tables 1(a)-1(j) or Table A) of a reporter polypeptide (such as one described hereinbelow in the TARGET TISSUES OR CELLS section or described anywhere else herein). The peptide substrate (or the first peptide substrate, or the second peptide substrate) can have at most four, or at most three, or at most two, or at most one amino acid substitution(s) with respect to a cleavage sequence (such as one set forth in Tables 1(a)-1(j) or Table A) of the reporter polypeptide. The peptide substrate (or the first peptide substrate, or the second peptide substrate) can comprise an amino acid sequence identical to a cleavage sequence (such as one set forth in Tables 1(a)-1(j) or Table A) of the reporter polypeptide. In some embodiments of the therapeutic agent (or the activatable therapeutic agent, or the non-natural, activatable therapeutic agent), the peptide substrate (or the first peptide substrate, or the second peptide substrate) can comprise an amino acid sequence having at most four, or at most three, or at most two, or at most one amino acid substitution(s) with respect to a sequence set forth in Column II or III of Table A (or a subset thereof) and/or the group set forth in Tables 1(a)-1(j) (or any subset thereof). The peptide substrate (or the first peptide substrate, or the second peptide substrate) can comprise an amino acid sequence having at most four, or at most three, or at most two, or at most one amino acid substitution(s) with respect to a sequence set forth in Column II or III of Table A (or a subset thereof) and/or the group set forth in Tables 1(a)-1(j) (or any subset thereof). The peptide substrate (or the first peptide substrate, or the second peptide substrate) can comprise an amino acid sequence identical to a sequence set forth in Column II or III of Table A (or a subset thereof) and/or the group set forth in Tables 1(a)-1(j) (or any subset thereof). In some embodiments, the peptide substrate (or the first peptide substrate, or the second peptide substrate) comprises two or three sequences set forth in Column II or III of Table A (or a subset thereof). In some embodiments, where the peptide substrate (or the first peptide substrate, or the second peptide substrate) comprises two sequences set forth in Column II or III of Table A (or a subset thereof), the two sequences partially overlap one another. In some embodiments, where the peptide substrate (or the first peptide substrate, or the second peptide substrate) comprises two sequences set forth in Column II or III of Table A (or a subset thereof), the two sequences do not overlap one another. In some embodiments, where the peptide substrate (or the first peptide substrate, or the second peptide substrate) comprises three sequences set forth in Column II or III of Table A (or a subset thereof), two or all of the three sequences do not overlap one another. In some embodiments, where the peptide substrate (or the first peptide substrate, or the second peptide substrate) comprises three sequences set forth in Column II or III of Table A (or a subset thereof), one of the three sequences partially overlaps with another sequence or both other sequences of the three sequences. In some embodiments, where the peptide substrate (or the first peptide substrate, or the second peptide substrate) comprises three sequences set forth in Column II or III of Table A (or a subset thereof), two of the three sequences partially overlap with one another. In some embodiments, where the peptide substrate (or the first peptide substrate, or the second peptide substrate) comprises three sequences set forth in Column II or III of Table A (or a subset thereof), each two of the three sequences partially overlap with one another. In some embodiments, where the peptide substrate (or the first peptide substrate, or the second peptide substrate) comprises three sequences set forth in Column II or III of Table A (or a subset thereof), all of the three sequences partially overlap with one another. In some embodiments, none of the at most four, at most three, at most two, or at most one amino acid substitution(s) is/are at a position corresponding to an amino acid residue immediately adjacent to a scissile bond of a sequence set forth in Column II or III of Table A (or a subset thereof). In some embodiments, none of the at most four, at most three, at most two, or at most one amino acid substitution(s) is/are at a position corresponding to an amino acid residue immediately adjacent to a scissile bond of a corresponding sequence selected from the group set forth in Tables 1(a)-1(i) (or any subset thereof). In some embodiments, none of the at most four, at most three, at most two, or at most one amino acid substitution(s) is/are at a position corresponding to an amino acid residue immediately adjacent to a scissile bond of a corresponding sequence selected from the group set forth in Table 1(j) (or any subset thereof). The peptide substrate (or the first peptide substrate, or the second peptide substrate) can contain 4, 5, 6, 7, 8, 9, 10, 11, 12, 13, 14, 15, 16, 17, 18, 19, 20, 21, 22, 23, 24, or 25 amino acid residues or a range of any two of the foregoing values. The peptide substrate can contain from six to twenty-five or six to twenty amino acid residues. The peptide substrate can contain from six to twenty-five amino acid residues. The peptide substrate can contain from six to twenty amino acid residues. In some embodiments, the peptide substrate contains from seven to twelve amino acid residues. The peptide substrate can comprise a fragment of an amino acid sequence set forth in Column II or III of Table A (or a subset thereof) and/or the group set forth in Tables 1(a)-1(j) (or any subset thereof). The fragment of the peptide substrate can contain at least four amino acid residues and a corresponding scissile bond (such as indicated in Tables 1(a)-1(j) or Table A). The fragment of the peptide substrate can contain at least five, at least six, at least seven, at least eight, at least nine, or at least ten amino acid residues. In some cases, a portion of the peptide substrate that is N-terminal of the scissile bond can have at most four, or at most three, or at most two, or at most one amino acid substitution(s) with respect to a C-terminal end sequence containing from four to ten amino acid residues of a sequence set forth in Column IV or V of Table A (or a subset thereof). The portion of the peptide substrate that is N-terminal of the scissile bond can comprise a C-terminal end sequence containing from four to ten amino acid residues of a sequence set forth in Column IV or V of Table A (or a subset thereof). In some cases, a portion of the peptide substrate that is N-terminal of the scissile bond can have at most four, or at most three, or at most two, or at most one amino acid substitution(s) with respect to a C-terminal end sequence containing from four to ten amino acid residues of a sequence set forth in Column IV of Table A (or a subset thereof). The portion of the peptide substrate that is N-terminal of the scissile bond can comprise a C-terminal end sequence containing from four to ten amino acid residues of a sequence set forth in Column IV of Table A (or a subset thereof). In some cases, a portion of the peptide substrate that is N-terminal of the scissile bond can have at most four, or at most three, or at most two, or at most one amino acid substitution(s) with respect to a C-terminal end sequence containing from four to ten amino acid residues of a sequence set forth in Column V of Table A (or a subset thereof). The portion of the peptide substrate that is N-terminal of the scissile bond can comprise a C-terminal end sequence containing from four to ten amino acid residues of a sequence set forth in Column V of Table A (or a subset thereof). In some cases, a portion of the peptide substrate that is C-terminal of the scissile bond can have at most four, or at most three, or at most two, or at most one amino acid substitution(s) with respect to an N-terminal end sequence containing from four to ten amino acid residues of a sequence set forth in Column V or VI of Table A (or a subset thereof). The portion of the peptide substrate that is C-terminal of the scissile bond can an N-terminal end sequence containing from four to ten amino acid residues of a sequence set forth in Column V or VI of Table A (or a subset thereof). In some cases, a portion of the peptide substrate that is C-terminal of the scissile bond can have at most four, or at most three, or at most two, or at most one amino acid substitution(s) with respect to an N-terminal end sequence containing from four to ten amino acid residues of a sequence set forth in Column V of Table A (or a subset thereof). The portion of the peptide substrate that is C-terminal of the scissile bond can an N-terminal end sequence containing from four to ten amino acid residues of a sequence set forth in Column V of Table A (or a subset thereof). In some cases, a portion of the peptide substrate that is C-terminal of the scissile bond can have at most four, or at most three, or at most two, or at most one amino acid substitution(s) with respect to an N-terminal end sequence containing from four to ten amino acid residues of a sequence set forth in Column VI of Table A (or a subset thereof). The portion of the peptide substrate that is C-terminal of the scissile bond can an N-terminal end sequence containing from four to ten amino acid residues of a sequence set forth in Column VI of Table A (or a subset thereof). In some embodiments, where the peptide substrate comprises a scissile bond (for cleavage by one or more mammalian proteases), the peptide substrate does not comprise a methionine residue immediately N-terminal to the scissile bond. In some embodiments, where the peptide substrate comprises a plurality of scissile bonds, the peptide substrate does not comprise a methionine residue immediately N-terminal to at least one scissile bond of the plurality of scissile bonds. In some embodiments, where the peptide substrate comprises a plurality of scissile bonds, the peptide substrate does not comprise a methionine residue immediately N-terminal to each scissile bond of the plurality of scissile bonds. In some embodiments, the peptide substrate does not comprise an amino acid sequence selected from the group consisting of #279, #280, #282, #283, #298, #299, #302, #303, #305, #307, #308, #349, #396, #397, #416, #417, #418, #458, #459, #460, #466, #481 and #482 (or any combination thereof) of Column II of Table A.

[0173] In some embodiments of the therapeutic agent (or the activatable therapeutic agent, or the non-natural, activatable therapeutic agent) that comprises (1) a first release segment (RS1) comprising a first peptide substrate and (2) a second release segment (RS2) comprising a second peptide substrate, the second peptide substrate can contain 4, 5, 6, 7, 8, 9, 10, 11, 12, 13, 14, 15, 16, 17, 18, 19, 20, 21, 22, 23, 24, or 25 amino acid residues or a range of any two of the foregoing values. The second peptide substrate can contain from six to twenty-five or six to twenty amino acid residues. The second peptide substrate can contain from six to twenty-five amino acid residues. The second peptide substrate can contain from six to twenty amino acid residues. The second peptide substrate can contain from seven to twelve amino acid residues. The second peptide substrate can comprise an amino acid sequence having at most four, or at most three, or at most two, or at most one amino acid substitution(s) with respect to a sequence set forth in Column II or III of Table A (or a subset thereof) and/or the group set forth in Tables 1(a)-1(j) (or any subset thereof). The second peptide substrate can comprise an amino acid sequence having at most four, or at most three, or at most two, or at most one amino acid substitution(s) with respect to a sequence set forth in Column II or III of Table A (or a subset thereof) and/or the group set forth in Tables 1(a)-1(j) (or any subset thereof). The second peptide substrate can comprise an amino acid sequence identical to a sequence set forth in Column II or III of Table A (or a subset thereof) and/or the group set forth in Tables 1(a)-1(j) (or any subset thereof). In some embodiments, the second peptide substrate comprises two or three sequences set forth in Column II or III of Table A (or a subset thereof). In some embodiments, where the second peptide substrate comprises two sequences set forth in Column II or III of Table A (or a subset thereof), the two sequences (of the second peptide substrate) partially overlap one another. In some embodiments, where the second peptide substrate comprises two sequences set forth in Column II or III of Table A (or a subset thereof), the two sequences (of the second peptide substrate) do not overlap one another. In some embodiments, where the second peptide substrate comprises three sequences set forth in Column II or III of Table A (or a subset thereof), two or all of the three sequences (of the second peptide substrate) do not overlap one another. In some embodiments, where the second peptide substrate comprises three sequences set forth in Column II or III of Table A (or a subset thereof), one of the three sequences (of the second peptide substrate) partially overlaps with another sequence or both other sequences of the three sequences (of the second peptide substrate). In some embodiments, where the second peptide substrate comprises three sequences set forth in Column II or III of Table A (or a subset thereof), two of the three sequences (of the second peptide substrate) partially overlap with one another. In some embodiments, where the second peptide substrate comprises three sequences set forth in Column II or III of Table A (or a subset thereof), each two of the three sequences (of the second peptide substrate) partially overlap with one another. In some embodiments, where the second peptide substrate comprises three sequences set forth in Column II or III of Table A (or a subset thereof), all of the three sequences (of the second peptide substrate) partially overlap with one another. In some embodiments, where the second peptide substrate comprises a scissile bond (for cleavage by one or more mammalian proteases), the second peptide substrate does not comprise a methionine residue immediately N-terminal to the scissile bond. In some embodiments, where the second peptide substrate comprises a plurality of scissile bonds, the second peptide substrate does not comprise a methionine residue immediately N-terminal to at least one scissile bond of the plurality of scissile bonds. In some embodiments, where the second peptide substrate comprises a plurality of scissile bonds, the second peptide substrate does not comprise a methionine residue immediately N-terminal to each scissile bond of the plurality of scissile bonds. In some embodiments, the second peptide substrate does not comprise an amino acid sequence selected from the group consisting of #279, #280, #282, #283, #298, #299, #302, #303, #305, #307, #308, #349, #396, #397, #416, #417, #418, #458, #459, #460, #466, #481 and #482 (or any combination thereof) of Column II of Table A.

[0174] In some embodiments of the present disclosure, the peptide substrate (or the first peptide substrate, or the second peptide substrate) does not comprise a sequence selected from SEQ ID NOS: 1-8. In some embodiments, the peptide substrate (or the first peptide substrate, or the second peptide substrate) does not comprise a sequence of SEQ ID NO: 1. In some embodiments, the peptide substrate (or the first peptide substrate, or the second peptide substrate) does not comprise a sequence of SEQ ID NO: 2. In some embodiments, the peptide substrate (or the first peptide substrate, or the second peptide substrate) does not comprise a sequence of SEQ ID NO: 3. In some embodiments, the peptide substrate (or the first peptide substrate, or the second peptide substrate) does not comprise a sequence of SEQ ID NO: 4. In some embodiments, the peptide substrate (or the first peptide substrate, or the second peptide substrate) does not comprise a sequence of SEQ ID NO: 5. In some embodiments, the peptide substrate (or the first peptide substrate, or the second peptide substrate) does not comprise a sequence of SEQ ID NO: 6. In some embodiments, the peptide substrate (or the first peptide substrate, or the second peptide substrate) does not comprise a sequence of SEQ ID NO: 7. In some embodiments, the peptide substrate (or the first peptide substrate, or the second peptide substrate) does not comprise a sequence of SEQ ID NO: 8. In some embodiments, the peptide substrate (or the first peptide substrate, or the second peptide substrate) does not comprise a methionine residue immediately N-terminal to a scissile bond (contained therein) (for cleavage by one or more mammalian proteases). In some embodiments, the peptide substrate (or the first peptide substrate, or the second peptide substrate) does not comprise a methionine residue immediately N-terminal to one or more scissile bonds (contained therein). In some embodiments, the peptide substrate (or the first peptide substrate, or the second peptide substrate) does not comprise a methionine residue immediately N-terminal to any scissile bond (contained therein). In some embodiments, the peptide substrate (or the first peptide substrate or the second peptide substrate) does not comprise an amino acid sequence selected from the group consisting of #279, #280, #282, #283, #298, #299, #302, #303, #305, #307, #308, #349, #396, #397, #416, #417, #418, #458, #459, #460, #466, #481 and #482 (or any combination thereof) of Column II of Table A.

[0175] In some embodiments of the therapeutic agent (or the activatable therapeutic agent, or the non-natural, activatable therapeutic agent), a six to ten consecutive amino acid sequence of a peptide substrate (e.g., a first peptide substrate, a second peptide substrate, etc.) comprises at most four, at most three, at most two, or at most one amino acid substitution(s), with respect to a corresponding six to ten consecutive amino acid sequence of a sequence set forth in Column II or III of Table A (or a subset thereof). In some embodiments, a six to ten consecutive amino acid sequence of a peptide substrate (e.g., a first peptide substrate, a second peptide substrate, etc.) is identical to a corresponding six to ten consecutive amino acid sequence of a sequence set forth in Column II or III of Table A (or a subset thereof). In some embodiments, an eight to ten consecutive amino acid sequence of a peptide substrate (e.g., a first peptide substrate, a second peptide substrate, etc.) comprises at most three, at most two, or at most one amino acid substitution(s), with respect to a corresponding eight to ten consecutive amino acid sequence of a sequence set forth in Column II or III of Table A (or a subset thereof). In some embodiments, an eight to ten consecutive amino acid sequence of a peptide substrate (e.g., a first peptide substrate, a second peptide substrate, etc.) is identical to a corresponding eight to ten consecutive amino acid sequence of a sequence set forth in Column II or III of Table A (or a subset thereof). In some embodiments, an eight consecutive amino acid sequence of a peptide substrate (e.g., a first peptide substrate, a second peptide substrate, etc.) comprises at most three, at most two, or at most one amino acid substitution(s), with respect to a corresponding eight consecutive amino acid sequence of a sequence set forth in Column II or III of Table A (or a subset thereof). In some embodiments, an eight consecutive amino acid sequence of a peptide substrate (e.g., a first peptide substrate, a second peptide substrate, etc.) is identical to a corresponding eight consecutive amino acid sequence of a sequence set forth in Column II or III of Table A (or a subset thereof). In some embodiments, a nine consecutive amino acid sequence of a peptide substrate (e.g., a first peptide substrate, a second peptide substrate, etc.) comprises at most three, at most two, or at most one amino acid substitution(s), with respect to a corresponding nine consecutive amino acid sequence of a sequence set forth in Column II or III of Table A (or a subset thereof). In some embodiments, a nine consecutive amino acid sequence of a peptide substrate (e.g., a first peptide substrate, a second peptide substrate, etc.) is identical to a corresponding nine consecutive amino acid sequence of a sequence set forth in Column II or III of Table A (or a subset thereof). In some embodiments, a ten consecutive amino acid sequence of a peptide substrate (e.g., a first peptide substrate, a second peptide substrate, etc.) comprises at most three, at most two, or at most one amino acid substitution(s), with respect to a corresponding ten consecutive amino acid sequence of a sequence set forth in Column II or III of Table A (or a subset thereof). In some embodiments, a ten consecutive amino acid sequence of a peptide substrate (e.g., a first peptide substrate, a second peptide substrate, etc.) is identical to a corresponding ten consecutive amino acid sequence of a sequence set forth in Column II or III of Table A (or a subset thereof).

[0176] In some embodiments of the therapeutic agent (or the activatable therapeutic agent, or the non-natural, activatable therapeutic agent), the release segment (RS) (or the first release segment (RS1), or the second release segment (RS2), can (each independently) comprise a peptide substrate (or a first peptide substrate, or a second peptide substrate) for cleavage by a mammalian protease, such as a serine protease, a cysteine protease, an aspartate protease, a threonine protease, or a metalloproteinase. The release segment (RS) (or the first release segment (RS1), or the second release segment (RS2), can (independently) comprise a peptide substrate (or a first peptide substrate, or a second peptide substrate) for cleavage by a mammalian protease selected from the group consisting of disintegrin and metalloproteinase domain-containing protein 10 (ADAM10), disintegrin and metalloproteinase domain-containing protein 12 (ADAM12), disintegrin and metalloproteinase domain-containing protein 15 (ADAM15), disintegrin and metalloproteinase domain-containing protein 17 (ADAM17), disintegrin and metalloproteinase domain-containing protein 9 (ADAM9), disintegrin and metalloproteinase with thrombospondin motifs 5 (ADAMTS5), Cathepsin B, Cathepsin D, Cathepsin E, Cathepsin K, cathepsin L, cathepsin S, Fibroblast activation protein alpha, Hepsin, kallikrein-2, kallikrein-4, kallikrein-3, Prostate-specific antigen (PSA), kallikrein-13, Legumain, matrix metallopeptidase 1 (MMP-1), matrix metallopeptidase 10 (MMP-10), matrix metallopeptidase 11 (MMP-11), matrix metallopeptidase 12 (MMP-12), matrix metallopeptidase 13 (MMP-13), matrix metallopeptidase 14 (MMP-14), matrix metallopeptidase 16 (MMP-16), matrix metallopeptidase 2 (MMP-2), matrix metallopeptidase 3 (MMP-3), matrix metallopeptidase 7 (MMP-7), matrix metallopeptidase 8 (MMP-8), matrix metallopeptidase 9 (MMP-9), matrix metallopeptidase 4 (MMP-4), matrix metallopeptidase 5 (MMP-5), matrix metallopeptidase 6 (MMP-6), matrix metallopeptidase 15 (MMP-15), neutrophil elastase, protease activated receptor 2 (PAR2), plasmin, prostasin, PSMA-FOLH1, membrane type serine protease 1 (MT-SP1), matriptase, and u-plasminogen. The release segment (RS) (or the first release segment (RS1), or the second release segment (RS2), can (independently) comprise a peptide substrate (or a first peptide substrate, or a second peptide substrate) for cleavage by a mammalian protease selected from the group consisting of matrix metallopeptidase 1 (MMP1) (for which the sequences listed in Table 1(a), as examples without being limited to, are substrate sequences), matrix metallopeptidase 2 (MMP2) (for which the sequences listed in Table 1(b), as examples without being limited to, are substrate sequences), matrix metallopeptidase 7 (MMP1) (for which the sequences listed in Table 1(c), as examples without being limited to, are substrate sequences), matrix metallopeptidase 9 (MMP9) (for which the sequences listed in Table 1(d), as examples without being limited to, are substrate sequences), matrix metallopeptidase 11 (MMP11) (for which the sequences listed in Table 1(e), as examples without being limited to, are substrate sequences), matrix metallopeptidase 14 (MMP14) (for which the sequences listed in Table 1(f), as examples without being limited to, are substrate sequences), urokinase-type plasminogen activator (uPA) (for which the sequences listed in Table 1(g), as examples without being limited to, are substrate sequences), legumain (for which the sequences listed in Table 1(h), as examples without being limited to, are substrate sequences), and matriptase (for which the sequences listed in Table 1(i), as examples without being limited to, are substrate sequences). The release segment (RS) (or the first release segment (RS1), or the second release segment (RS2), can (independently) comprise a peptide substrate (or a first peptide substrate, or a second peptide substrate) for cleavage by a plurality of mammalian proteases. The peptide substrate (or the first peptide substrate, or the second peptide substrate) susceptible to cleavage by the mammalian protease can be susceptible to cleavage by a plurality of mammalian proteases comprising the mammalian protease. The peptide substrate (or the first peptide substrate, or the second peptide substrate) susceptible to cleavage by the plurality of mammalian proteases can have at most four, or at most three, or at most two, or at most one amino acid substitution(s) with respect to a sequence set forth in Table 1(j). The peptide substrate (or the first peptide substrate, or the second peptide substrate) susceptible to cleavage by the plurality of mammalian proteases can have at most four, or at most three, or at most two, or at most one amino acid substitution(s) with respect to a sequence set forth in Table 1(j). The peptide substrate (or the first peptide substrate, or the second peptide substrate) susceptible to cleavage by the plurality of mammalian proteases can have at most four, or at most three, or at most two, or at most one amino acid substitution(s) with respect to a sequence set forth in Table 1(j). The peptide substrate (or the first peptide substrate, or the second peptide substrate) susceptible to cleavage by the plurality of mammalian proteases can comprise a sequence set forth in Table 1(j).

[0177] In some embodiments of the therapeutic agent (or the activatable therapeutic agent, or the non-natural, activatable therapeutic agent) that comprises a set of release segments, each release segment in the set can (independently) comprise a peptide substrate for cleavage by a mammalian protease, such as a serine protease, a cysteine protease, an aspartate protease, a threonine protease, or a metalloproteinase. Each release segment in the set can (independently) comprise a peptide substrate for a different mammalian protease (independently) selected from the group consisting of disintegrin and metalloproteinase domain-containing protein 10 (ADAM10), disintegrin and metalloproteinase domain-containing protein 12 (ADAM12), disintegrin and metalloproteinase domain-containing protein 15 (ADAM15), disintegrin and metalloproteinase domain-containing protein 17 (ADAM17), disintegrin and metalloproteinase domain-containing protein 9 (ADAM9), disintegrin and metalloproteinase with thrombospondin motifs 5 (ADAMTS5), Cathepsin B, Cathepsin D, Cathepsin E, Cathepsin K, cathepsin L, cathepsin S, Fibroblast activation protein alpha, Hepsin, kallikrein-2, kallikrein-4, kallikrein-3, Prostate-specific antigen (PSA), kallikrein-13, Legumain, matrix metallopeptidase 1 (MMP-1), matrix metallopeptidase 10 (MMP-10), matrix metallopeptidase 11 (MMP-11), matrix metallopeptidase 12 (MMP-12), matrix metallopeptidase 13 (MMP-13), matrix metallopeptidase 14 (MMP-14), matrix metallopeptidase 16 (MMP-16), matrix metallopeptidase 2 (MMP-2), matrix metallopeptidase 3 (MMP-3), matrix metallopeptidase 7 (MMP-7), matrix metallopeptidase 8 (MMP-8), matrix metallopeptidase 9 (MMP-9), matrix metallopeptidase 4 (MMP-4), matrix metallopeptidase 5 (MMP-5), matrix metallopeptidase 6 (MMP-6), matrix metallopeptidase 15 (MMP-15), neutrophil elastase, protease activated receptor 2 (PAR2), plasmin, prostasin, PSMA-FOLH1, membrane type serine protease 1 (MT-SP1), matriptase, and u-plasminogen. Each release segment in the set can (independently) comprise a peptide substrate for a different mammalian protease (independently) selected from the group consisting of matrix metallopeptidase 1 (MMP1) (for which the sequences listed in Table 1(a), as examples without being limited to, are substrate sequences), matrix metallopeptidase 2 (MMP2) (for which the sequences listed in Table 1(b), as examples without being limited to, are substrate sequences), matrix metallopeptidase 7 (MMP1) (for which the sequences listed in Table 1(c), as examples without being limited to, are substrate sequences), matrix metallopeptidase 9 (MMP9) (for which the sequences listed in Table 1(d), as examples without being limited to, are substrate sequences), matrix metallopeptidase 11 (MMP11) (for which the sequences listed in Table 1(e), as examples without being limited to, are substrate sequences), matrix metallopeptidase 14 (MMP14) (for which the sequences listed in Table 1(f), as examples without being limited to, are substrate sequences), urokinase-type plasminogen activator (uPA) (for which the sequences listed in Table 1(g), as examples without being limited to, are substrate sequences), legumain (for which the sequences listed in Table 1(h), as examples without being limited to, are substrate sequences), and matriptase (for which the sequences listed in Table 1(i), as examples without being limited to, are substrate sequences). In some cases, at least one release segment (RS) of the set of release segments can (independently) comprise a peptide substrate for cleavage by a plurality of mammalian proteases. The peptide substrate susceptible to cleavage by the plurality of mammalian proteases can have at most four, or at most three, or at most two, or at most one amino acid substitution(s) with respect to a sequence set forth in Table 1(j). The peptide substrate susceptible to cleavage by the plurality of mammalian proteases can have at most four, or at most three, or at most two, or at most one amino acid substitution(s) with respect to a sequence set forth in Table 1(j). The peptide substrate susceptible to cleavage by the plurality of mammalian proteases can have at most four, or at most three, or at most two, or at most one amino acid substitution(s) with respect to a sequence set forth in Table 1(j). The peptide substrate susceptible to cleavage by the plurality of mammalian proteases can comprise a sequence set forth in Table 1(j). One of skill in the art will understand that a sequence set forth in Tables 1(a)-1(j) may, alternatively or additionally, be cleaved by one or more other proteases with substrate specificity similar to that of a corresponding protease, identified in a corresponding table, as capable of cleaving the sequence.

TABLE 1a
Exemplary peptide substrates for cleavage by
matrix metallopeptidase 1 (MMP1)

| | SEQ | |
|---|---|---|
| | ID | Amino Acid |
| Name of Reporter Polypeptide | NO: | Sequence |
| elastin | 36 | IGPGG-VAAAA |
| alpha-1-antitrypsin | 37 | DPQG-DAAQ |
| type I collagen alpha-1 chain | 38 | DGVRG-LTGPI |
| type V collagen alpha-1 chain | 39 | RGPSG-HMGRE |
| elastin | 40 | ISPEA-QAAAA |
| Complement C4-B OR Complement | 41 | TPLQ-LFEG |
| C4-A | | |
| type III collagen alpha-1 chain | 42 | QGPPG-KNGET |
| alpha-2-HS-glycoprotein | 43 | PPLG-APGL |
| apolipoprotein L1 | 44 | KPLG-DWAA |
| type II collagen alpha-1 chain | 45 | DGAAG-VKGDR |

TABLE 1b
Exemplary peptide substrates for cleavage by
matrix metallopeptidase 2 (MMP2)

| | SEQ | |
|---|---|---|
| | ID | Amino Acid |
| Name of Reporter Polypeptide | NO: | Sequence |
| alpha-1-antichymotrypsin | 46 | LLSA-LVET |
| pigment epithelium-derived factor | 47 | QPAH-LTFP |
| SPARC | 48 | DHPVE-LLARD |
| integrin alpha-IIb | 49 | QPSR-LQDP |
| type I collagen alpha-1 chain | 50 | DGVRG-LTGPI |
| zyxin | 51 | QPVS-LANT |
| elastin | 52 | IGPGG-VAAAA |
| vitronectin | 53 | LTSD-LQAQ |
| immunoglobulin kappa variable 2-30 | 54 | SPLS-LPVT |
| type IV collagen alpha-1 chain | 55 | GDPGE-ILGHV |

TABLE 1c
Exemplary peptide substrates for cleavage by
matrix metallopeptidase 7 (MMP7)

| | SEQ | |
|---|---|---|
| | ID | Amino Acid |
| Name of Reporter Polypeptide | NO: | Sequence |
| elastin | 56 | IGPGG-VAAAA |
| Complement C4-B OR Complement C4-A | 57 | TPLQ-LFEG |
| SPARC | 58 | DHPVE-LLARD |
| type I collagen alpha-1 chain | 59 | DGVRG-LTGPI |
| immunoglobulin kappa variable 2-30 | 60 | LPVT-LGQP |
| pigment epithelium-derived factor | 61 | QPAH-LTFP |
| probable non-functional | 62 | SPVT-LGQP |
| immunoglobulin kappa | | |
| variable 2D-24 | | |
| immunoglobulin kappa variable 3-20 | 63 | GTLS-LSPG |
| fibrinogen beta chain | 64 | EEAPS-LRPA |
| type II collagen alpha-1 chain | 65 | DGAAG-VKGDR |

TABLE 1(d)
Exemplary peptide substrates for cleavage by
matrix metallopeptidase 9 (MMP9)

| | SEQ | |
|---|---|---|
| | ID | Amino Acid |
| Name of Reporter Polypeptide | NO: | Sequence |
| type I collagen alpha-1 chain | 66 | DGVRG-LTGPI |
| elastin | 67 | IGPGG-VAAAA |
| type III collagen alpha-1 chain | 68 | QGPPG-KNGET |
| type V collagen alpha-1 chain | 69 | RGPSG-HMGRE |
| type II collagen alpha-1 chain | 70 | DGAAG-VKGDR |
| type VI collagen alpha-1 chain | 71 | KGAKG-YRGPE |
| alpha-2-HS-glycoprotein | 72 | PPLG-APGL |
| type VI collagen alpha-3 chain | 73 | IGNRG-PRGET |
| chromogranin-A | 74 | GPQL-RRGW |
| transcription factor SOX-10 | 75 | SPPG-VDAK |

TABLE 1(e)
Exemplary peptide substrates for cleavage by
matrix metallopeptidase 11 (MMP11)

| | SEQ | |
|---|---|---|
| | ID | Amino Acid |
| Name of Reporter Polypeptide | NO: | Sequence |
| alpha-1-antitrypsin | 76 | AAGA-MFLE |
| serum amyloid A-1 protein | 77 | AAEA-ISDA |
| fibrinogen alpha chain | 78 | EAAF-FDTA |
| complement C4-A OR complement | 79 | KSHA-LQLN |
| C4-B | | |
| apolipoprotein C-III | 80 | SARA-SEAE |
| ceruloplasmin | 81 | PAWA-KEKH |
| serum amyloid A-2 protein | 82 | AWAA-EVIS |
| fibrinogen beta chain | 83 | EEAPS-LRPA |
| immunoglobulin lambda variable | 84 | SEAS-YELT |
| 3-25 | | |
| PDZ and LIM domain protein 1 | 85 | PFTA-SPAS |

TABLE 1(f)
Exemplary peptide substrates for cleavage by
matrix metallopeptidase 14 (MMP14)

| | SEQ | |
|---|---|---|
| | ID | Amino Acid |
| Name of Reporter Polypeptide | NO: | Sequence |
| integrin alpha-IIb | 86 | QPSR-LQDP |
| alpha-1-antichymotrypsin | 87 | LLSA-LVET |
| pigment epithelium-derived factor | 88 | QPAH-LTFP |
| Complement C4-B OR Complement | 89 | TPLQ-LFEG |
| C4-A | | |
| zyxin | 90 | QPVS-LANT |
| type I collagen alpha-1 chain | 91 | DGVRG-LTGPI |
| SPARC | 92 | DHPVE-LLARD |
| immunoglobulin kappa variable | 93 | SPLS-LPVT |
| 2-30 | | |
| immunoglobulin kappa variable | 94 | LPVT-LGQP |
| 2-30 | | |
| elastin | 95 | IGPGG-VAAAA |

TABLE 1(g)
Exemplary peptide substrates for cleavage by
urokinase-type plasminogen activator (uPA)

| | SEQ | Amino |
|---|---|---|
| | ID | Acid |
| Name of Reporter Polypeptide | NO: | Sequence |
| serum amyloid A-2 protein | 96 | RSGR-DPNH |
| serum amyloid A-2 protein | 97 | AAKR-GPGG |
| deleted in malignant brain | 98 | RSKR-DVGS |
| tumors 1 protein | | |
| secretogranin-2 | 99 | VSKR-FPVG |
| serum amyloid A-1 protein OR | 100 | VSSR-SFFS |
| serum amyloid A-2 protein | | |
| haptoglobin | 101 | PVQR-ILGG |
| fibrinogen alpha chain | 102 | SSGP-GSTG |
| fibrinogen beta chain | 103 | FSAR-GHRP |
| complement C4-A OR complement | 104 | RQIR-GLEE |
| C4-B | | |
| oncoprotein-induced transcript | 105 | RMRR-GAGG |
| 3 protein | | |

TABLE 1(h)
Exemplary peptide substrates for cleavage by
legumain

| | SEQ | |
|---|---|---|
| | ID | Amino Acid |
| Name of Reporter Polypeptide | NO: | Sequence |
| neurosecretory protein VGF | 106 | RKKN-APPE |
| coagulation factor XII | 107 | GDRN-KPGV |
| Complement C4-B OR Complement | 108 | TGRN-GFKS |
| C4-A | | |
| fibrinogen alpha chain | 109 | GSWN-SGSS |
| tubulin beta chain | 110 | EPYN-ATLS |
| transthyretin | 111 | FTAN-DSGP |
| fibrinogen beta chain | 112 | QGVN-DNEE |
| fibrinogen alpha chain | 113 | SPRN-PSSA |
| angiotensinogen | 114 | QQLN-KPEV |
| multimerin-1 | 115 | TSLN-TVGG |

TABLE 1(i)
Exemplary peptide substrates for cleavage by
matriptase

| | SEQ | Amino |
|---|---|---|
| | ID | Acid |
| Name of Reporter Polypeptide | NO: | Sequence |
| oncoprotein-induced transcript | 116 | RMRR-GAGG |
| 3 protein | | |
| deleted in malignant brain | 117 | RSKR-DVGS |
| tumors 1 protein | | |
| serum amyloid A-2 protein | 118 | AAKR-GPGG |
| inter-alpha-trypsin inhibitor | 119 | RVPR-QVRL |
| heavy chain H5 | | |
| haptoglobin | 120 | PVQR-ILGG |
| alpha-2-HS-glycoprotein | 121 | RKTR-TVVQ |
| sulfhydryl oxidase 1 | 122 | PGLR-AAPG |
| gastric inhibitory polypeptide | 123 | RGPR-YAEG |
| keratin, type I cytoskeletal 17 | 124 | RQVR-TIVE |
| complement C4-A OR complement | 125 | RQIR-GLEE |
| C4-B | | |

TABLE 1(j)
Exemplary peptide substrates for cleavage by
multiple proteases

| SEQ | | Exemplary Proteases That |
|---|---|---|
| ID | | May Cleave the Peptide |
| NO. | Amino Acid Sequence | substrate |
| 1 | GPGG-VAAAVSKR-FPVG | MMP2, MMP7, uPA |
| 2 | GVRG-LTGPVSKR-FPVG | MMP2, MMP7, uPA |
| 3 | VSKR-FPVGEAGR-SAN-H | uPA, matriptase, |
| | | legumain |
| 4 | EAGR-SAN-HGVRG-LTGP | matriptase, legumain, |
| | | MMP1 |
| 5 | EAGR-SAN-HTPAG-LTGP | MMP2, MMP9, matriptase, |
| | | legumain |
| 6 | SPEA-QAAAEAGR-SAN-H | MMP1, matriptase, |
| | | legumain |
| 7 | QPAH-LTFPEAGR-SAN-H | MMP2, MMP14, legumain, |
| | | matriptase |
| 8 | AGSPGK-DGVRG-LTGP | matriptase, MMP2, MMP9 |

### Masking Moieties (MM)

[0178] A masking moiety (MM) of the present disclosure may be capable of specifically or non-specifically interacting with a biologically active moiety (BM) (or any component(s) or fragment(s) thereof) of an activatable therapeutic agent composition (such as described herein), thereby masking the BM (at least in certain cases) by inhibiting or reducing the ability of the BM to bind with designated target(s). In some instances, the masking moiety (MM) may specifically bind to or have specific affinity for the biologically active moiety (e.g., an antibody or antibody fragment), thereby interfering and/or inhibiting binding of the BM to its designed target (e.g., antigen target). In some instances, the masking moiety does not have significant affinity for the biologically active moiety, but exerts it masking effect due to non-specific steric hinderance.

[0179] In some embodiments of the therapeutic agent (or the activatable therapeutic agent, or the non-natural, activatable therapeutic agent), the masking moiety (MM) (or the first masking moiety (MM1), or the second masking moiety (MM2)), when linked to the corresponding therapeutic agent, can (each independently, individually or collectively) interfere with an interaction of the biologically active moiety (BM) to a target tissue or cell (such as one described hereinbelow in the TARGET TISSUES OR CELLS section or described anywhere else herein) such that a dissociation constant (K_{d}) of the BM of the therapeutic agent with a target cell marker (such as one described hereinbelow in the TARGET TISSUES OR CELLS section or described anywhere else herein) borne by the target tissue or cell can be greater, when the therapeutic agent is in an uncleaved state, compared to a dissociation constant (K_{d}) of a corresponding biologically active moiety (as remaining after the release segment (RS) is cleaved and the MM is released) with the target cell marker. The dissociation constant (K_{d}) of the biologically active moiety (BM) of the therapeutic agent, when the therapeutic agent is in an uncleaved state, with the target cell marker can be at least (about) 2-fold greater, at least (about) 5-fold greater, at least (about) 10-fold greater, at least (about) 50-fold greater, at least (about) 100-fold greater, at least (about) 200-fold greater, at least (about) 300-fold greater, at least (about) 400-fold greater, at least (about) 500-fold greater, at least (about) 600-fold greater, at least (about) 700-fold greater, at least (about) 800-fold greater, at least (about) 900-fold greater, or at least (about) 1000-fold greater, than the dissociation constant (Kd) of the corresponding biologically active moiety with the target cell marker. The dissociation constant (Kd) can be measured in an in vitro assay under equivalent molar concentrations. The in vitro assay can be selected from cell membrane integrity assay, mixed cell culture assay, cell-based competitive binding assay, FACS based propidium Iodide assay, trypan Blue influx assay, photometric enzyme release assay, radiometric 51Cr release assay, fluorometric Europium release assay, CalceinAM release assay, photometric MTT assay, XTT assay, WST-1 assay, alamar blue assay, radiometric 3H-Thd incorporation assay, clonogenic assay measuring cell division activity, fluorometric rhodamine123 assay measuring mitochondrial transmembrane gradient, apoptosis assay monitored by FACS-based phosphatidylserine exposure, ELISA-based TUNEL test assay, sandwich ELISA, caspase activity assay, cell-based LDH release assay, and cell morphology assay, reporter gene activity assay, or any combination thereof.

[0180] In some embodiments of the therapeutic agent (or the activatable therapeutic agent, or the non-natural, activatable therapeutic agent), the therapeutic agent can effect an enhancement in a safety profile, for example, improve a maximum tolerable exposure level (MTEL), and/or reduce a side effect (e.g., cytotoxicity), in delivery of the BM to a target tissue or cell (such as one described hereinbelow in the TARGET TISSUES OR CELLS section or described anywhere else herein) compared to a corresponding biologically active moiety (as remaining after the release segment (RS) is cleaved and the MM is released). The therapeutic agent, in which the biologically active moiety (BM) is linked (directly or indirectly) to the masking moiety (MM) (or the first masking moiety (MM1), or the second masking moiety (MM2)) can effect an enhancement in a safety profile, for example, improve a maximum tolerable exposure level (MTEL), and/or reduce a side effect (e.g., cytotoxicity), by at least (about) 2-fold, by at least (about) 5-fold, by at least (about) 10 fold, by at least (about) 50-fold, by at least (about) 100-fold, by at least (about) 200-fold, by at least (about) 300-fold, by at least (about) 400-fold, or by at least (about) 500-fold higher, in delivery of the BM to the target tissue or cell, than the corresponding biologically active moiety.

[0181] In some embodiments of the therapeutic agent (or the activatable therapeutic agent, or the non-natural, activatable therapeutic agent), the therapeutic agent can have a longer terminal half-life compared to that of a corresponding biologically active moiety. The therapeutic agent, in which the biologically active moiety (BM) is linked (directly or indirectly) to the masking moiety (MM) (or the first masking moiety (MM1), or the second masking moiety (MM2)) can have a terminal half-life of at least (about) 2-fold longer, at least (about) 5-fold longer, at least (about) 10-fold longer, at least (about) 15-fold longer, at least (about) 20-fold longer, at least (about) 50-fold longer, or at least (about) 100-fold longer, than the terminal half-life of the corresponding biologically active moiety.

[0182] In some embodiments, the therapeutic agent can be less immunogenic compared to a corresponding biologically active moiety. The therapeutic agent, in which the biologically active moiety (BM) is linked (directly or indirectly) to the masking moiety (MM) (or the first masking moiety (MM1), or the second masking moiety (MM2)), can be at least (about) 2-fold less immunogenic, at least (about) 5-fold less immunogenic, or at least (about) 10-fold less immunogenic, than the corresponding biologically active moiety. The immunogenicity can be ascertained by measuring production of IgG antibodies that selectively bind to the biologically active moiety after administration of comparable doses to a subject.

[0183] In some embodiments, the therapeutic agent can have a greater apparent molecular weight factor under a physiological condition, compared to a corresponding biologically active moiety. The therapeutic agent, in which the biologically active moiety (BM) is linked (directly or indirectly) to the masking moiety (MM) (or the first masking moiety (MM1), or the second masking moiety (MM2)), can have an apparent molecular weight factor of at least (about) 1.5-fold greater, at least (about) 2-fold greater, at least (about) 5-fold greater, at least (about) 8-fold greater, at least (about) 10-fold greater, at least (about) 12-fold greater, at least (about) 15-fold greater, at least (about) 18-fold greater, or at least (about) 20-fold greater, under a physiological condition, than the corresponding biologically active moiety.

[0184] In some embodiments of the therapeutic agent (or the activatable therapeutic agent, or the non-natural, activatable therapeutic agent) that comprises a first masking moiety (MM1) and a second masking moiety (MM2), the MM1 and the MM2, when both linked in the therapeutic agent, can (each independently, individually or collectively) interfere with an interaction of the biologically active moiety (BM) to a target tissue or cell (such as one described hereinbelow in the TARGET TISSUES OR CELLS section or described anywhere else herein) such that a dissociation constant (K_{d}) of the biologically active moiety (BM) of the therapeutic agent with a target cell marker (such as one described hereinbelow in the TARGET TISSUES OR CELLS section or described anywhere else herein) borne by the target tissue or cell can be greater, when the therapeutic agent is in an uncleaved state, compared to a dissociation constant (Kd) of a corresponding biologically active peptide (as remaining after one or both of the first release segment (RS1) and the second release segment (RS2) is/are cleaved and one or both of the MM1 and the MM2 is/are released). The dissociation constant (Kd) of the biologically active moiety (BM) of the therapeutic agent, when the therapeutic agent is in an uncleaved state, with the target cell marker can be at least (about) 2-fold greater, at least (about) 5-fold greater, at least (about) 10-fold greater, at least (about) 50-fold greater, at least (about) 100-fold greater, at least (about) 200-fold greater, at least (about) 300-fold greater, at least (about) 400-fold greater, at least (about) 500-fold greater, at least (about) 600-fold greater, at least (about) 700-fold greater, at least (about) 800-fold greater, at least (about) 900-fold greater, or at least (about) 1000-fold greater, than the dissociation constant (Kd) of the corresponding biologically active peptide. The dissociation constant (Kd) can be measured in an in vitro assay under equivalent molar concentrations. The in vitro assay can be selected from cell membrane integrity assay, mixed cell culture assay, cell-based competitive binding assay, FACS based propidium Iodide assay, trypan Blue influx assay, photometric enzyme release assay, radiometric ⁵¹Cr release assay, fluorometric Europium release assay, CalceinAM release assay, photometric MTT assay, XTT assay, WST-1 assay, alamar blue assay, radiometric 3H-Thd incorporation assay, clonogenic assay measuring cell division activity, fluorometric rhodamine123 assay measuring mitochondrial transmembrane gradient, apoptosis assay monitored by FACS-based phosphatidylserine exposure, ELISA-based TUNEL test assay, sandwich ELISA, caspase activity assay, cell-based LDH release assay, reporter gene activity assay, and cell morphology assay, or any combination thereof.

[0185] In some embodiments of the therapeutic agent (or the activatable therapeutic agent, or the non-natural, activatable therapeutic agent) that comprises a first masking moiety (MM1) and a second masking moiety (MM2), the therapeutic agent, in which the biologically active moiety (BM) is linked, directly or indirectly, to one or both of the MM1 and the MM2, can effect an enhancement in a safety profile, for example, improve a maximum tolerable exposure level (MTEL), and/or reduce a side effect (e.g., cytotoxicity), in delivery of the biologically active moiety (BM) to the target tissue or cell compared to a corresponding biologically active moiety (as remaining after one or both of the first release segment (RS1) and the second release segment (RS2) is/are cleaved and one or both of the MM1 and the MM2 is/are released). The therapeutic agent, in which the biologically active moiety (BM) is linked (directly or indirectly) to one or both of the MM1 and the MM2, can effect an enhancement in a safety profile, for example, improve a maximum tolerable exposure level (MTEL), and/or reduce a side effect (e.g., cytotoxicity) by at least (about) 2-fold, by at least (about) 5-fold, by at least (about) 10 fold, by at least (about) 50-fold, by at least (about) 100-fold, by at least (about) 200-fold, by at least (about) 300-fold, by at least (about) 400-fold, or by at least (about) 500-fold higher in delivery of the BM to the target tissue or cell, than the corresponding biologically active moiety.

[0186] In some embodiments of the therapeutic agent (or the activatable therapeutic agent, or the non-natural, activatable therapeutic agent) that comprises a first masking moiety (MM1) and a second masking moiety (MM2), the therapeutic agent, in which the biologically active moiety (BM) is linked, directly or indirectly, to one or both of the MM1 and the MM2, can have a longer terminal half-life compared to that of a corresponding biologically active moiety (as remaining after one or both of the first release segment (RS1) and the second release segment (RS2) is/are cleaved and one or both of the MM1 and the MM2 is/are released). The therapeutic agent, in which the biologically active moiety (BM) is linked (directly or indirectly) to one or both of the MM1 and the MM2, can have a terminal half-life of at least (about) 2-fold longer, at least (about) 5-fold longer, at least (about) 10-fold longer, at least (about) 15-fold longer, at least (about) 20-fold longer, at least (about) 50-fold longer, at least (about) 100-fold longer, than the terminal half-life of the corresponding biologically active moiety.

[0187] In some embodiments of the therapeutic agent (or the activatable therapeutic agent, or the non-natural, activatable therapeutic agent) that comprises a first masking moiety (MM1) and a second masking moiety (MM2), the therapeutic agent, in which the biologically active moiety (BM) is linked, directly or indirectly, to one or both of the MM1 and MM2, can be less immunogenic compared to a corresponding biologically active moiety (as remaining after one or both of the first release segment (RS1) and the second release segment (RS2) is/are cleaved and one or both of the MM1 and the MM2 is/are released). The therapeutic agent, in which the biologically active moiety (BM) is linked (directly or indirectly) to one or both of the MM1 and the MM2, can be at least (about) 2-fold less immunogenic, at least (about) 5-fold less immunogenic, or at least (about) 10-fold less immunogenic, than the corresponding biologically active moiety. The immunogenicity can be ascertained by measuring production of IgG antibodies that selectively bind to the biologically active moiety after administration of comparable doses to a subject.

[0188] In some embodiments of the therapeutic agent (or the activatable therapeutic agent, or the non-natural, activatable therapeutic agent) that comprises a first masking moiety (MM1) and a second masking moiety (MM2), the therapeutic agent, in which the biologically active moiety (BM) is linked, directly or indirectly, to one or both of the MM1 and the MM2, can have a greater apparent molecular weight factor under a physiological condition compared to a corresponding biologically active moiety. The therapeutic agent, in which the biologically active moiety (BM) is linked (directly or indirectly) to one or both of the MM1 and the MM2, can have an apparent molecular weight factor of at least (about) 1.5-fold greater, at least (about) 2-fold greater, at least (about) 5-fold greater, at least (about) 8-fold greater, at least (about) 10-fold greater, at least (about) 12-fold greater, at least (about) 15-fold greater, at least (about) 18-fold greater, or at least (about) 20-fold greater, under a physiological condition, than the corresponding biologically active moiety.

[0189] In some embodiments of the therapeutic agent (or the activatable therapeutic agent, or the non-natural, activatable therapeutic agent), the masking moiety (MM) (or the first masking moiety (MM1), or the second masking moiety (MM2)) can (each independently) comprise an extended recombinant polypeptide (XTEN). The XTEN can be characterized in that: (i) it comprises at least 100 amino acids; (ii) at least 90% of the amino acid residues of it are selected from glycine (G), alanine (A), serine (S), threonine (T), glutamate (E) and proline (P); and (iii) it comprises at least 4 different types of amino acids selected from G, A, S, T, E, and P. The XTEN can be characterized in that: (i) it comprises at least 150 amino acids; (ii) at least 90% of the amino acid residues of it are selected from glycine (G), alanine (A), serine (S), threonine (T), glutamate (E) and proline (P); and (iii) it comprises at least 4 different types of amino acids selected from G, A, S, T, E, and P. The extended recombinant polypeptide (XTEN) can (each independently) comprise an amino acid sequence having at least (about) 90%, at least (about) 91%, at least (about) 92%, at least (about) 93%, at least (about) 94%, at least (about) 95%, at least (about) 96%, at least (about) 97%, at least (about) 98%, at least (about) 99%, or 100% sequence identity to a sequence set forth in Tables 2b-2c, or any subset thereof.

[0190] In some embodiments of the therapeutic agent (or the activatable therapeutic agent, or the non-natural, activatable therapeutic agent) that comprises (1) a first masking moiety (MM1) comprising a first extended recombinant polypeptide (XTEN1) and (2) a second masking moiety (MM2) comprising a second extended recombinant polypeptide (XTEN2), the XTEN2 can be characterized in that: (i) it comprises at least 100 amino acids; (ii) at least 90% of the amino acid residues of it are selected from glycine (G), alanine (A), serine (S), threonine (T), glutamate (E) and proline (P); and (iii) it comprises at least 4 different types of amino acids selected from G, A, S, T, E, and P. The XTEN2 can be characterized in that: (i) it comprises at least 150 amino acids; (ii) at least 90% of the amino acid residues of it are selected from glycine (G), alanine (A), serine (S), threonine (T), glutamate (E) and proline (P); and (iii) it comprises at least 4 different types of amino acids selected from G, A, S, T, E, and P. The XTEN2 can comprise an amino acid sequence having at least (about) 90%, at least (about) 91%, at least (about) 92%, at least (about) 93%, at least (about) 94%, at least (about) 95%, at least (about) 96%, at least (about) 97%, at least (about) 98%, at least (about) 99%, or 100% sequence identity to a sequence selected from the group of sequences set forth in Tables 2b-2c, or any subset thereof.

[0191] In some embodiments, the XTEN (or the XTEN1, or the XTEN2) can (each independently) comprise, or can (each independently) be formed from, a plurality of non-overlapping sequence motifs. At least one of the non-overlapping sequence motifs can be recurring (or repeated at least two times in the corresponding XTEN). At least one of the non-overlapping sequence motifs can be non-recurring (or found only once within the corresponding XTEN). The plurality of non-overlapping sequence motifs can comprise (i) a set of (recurring) non-overlapping sequence motifs, where each motif of the set is repeated at least two times in the corresponding XTEN and (ii) a non-overlapping (non-recurring) sequence motif that occurs (or is found) only once within the corresponding XTEN. Each non-overlapping sequence motif can be from 9 to 14 (or 10 to 14, or 11 to 13) amino acids in length. Each non-overlapping sequence motif can be 12 amino acids in length. The plurality of non-overlapping sequence motifs can comprise a set of non-overlapping (recurring) sequence motifs, where each motif of the set can be (1) repeated at least two times in the corresponding XTEN and (2) between 9 and 14 amino acids in length. The set of (recurring) non-overlapping sequence motifs can comprise 12-mer sequence motifs selected from the group set forth in Table 2a. The set of (recurring) non-overlapping sequence motifs can comprise 12-mer sequence motifs selected from the group set forth in Table 2a. The set of (recurring) non-overlapping sequence motifs can comprise at least two, at least three, or all four of 12-mer sequence motifs of the group set forth in Table 2a.

TABLE 2a
Exemplary 12-mer sequence motifs for construction
of the XTENs

| | SEQ | |
|---|---|---|
| | ID | |
| Motif Family* | NO: | Amino Acid Sequence |
| AD | 126 | GESPGGSSGSES |
| AD | 127 | GSEGSSGPGESS |
| AD | 128 | GSSESGSSEGGP |
| AD | 129 | GSGGEPSESGSS |
| AE, AM | 130 | GSPAGSPTSTEE |
| AE, AM, AQ | 131 | GSEPATSGSETP |
| AE, AM, AQ | 132 | GTSESATPESGP |
| AE, AM, AQ | 133 | GTSTEPSEGSAP |
| AF, AM | 134 | GSTSESPSGTAP |
| AF, AM | 135 | GTSTPESGSASP |
| AF, AM | 136 | GTSPSGESSTAP |
| AF, AM | 137 | GSTSSTAESPGP |
| AG, AM | 138 | GTPGSGTASSSP |
| AG, AM | 139 | GSSTPSGATGSP |
| AG, AM | 140 | GSSPSASTGTGP |
| AG, AM | 141 | GASPGTSSTGSP |
| AQ | 142 | GEPAGSPTSTSE |
| AQ | 143 | GTGEPSSTPASE |
| AQ | 144 | GSGPSTESAPTE |
| AQ | 145 | GSETPSGPSETA |
| AQ | 146 | GPSETSTSEPGA |
| AQ | 147 | GSPSEPTEGTSA |
| BC | 148 | GSGASEPTSTEP |
| BC | 149 | GSEPATSGTEPS |
| BC | 150 | GTSEPSTSEPGA |
| BC | 151 | GTSTEPSEPGSA |
| BD | 152 | GSTAGSETSTEA |
| BD | 153 | GSETATSGSETA |
| BD | 154 | GTSESATSESGA |
| BD | 155 | GTSTEASEGSAS |

*Denotes individual motif sequences that, when used together in various permutations, results in a “family sequence”

TABLE 2b
Exemplary XTEN polypeptides

| XTEN | SEQ ID | |
|---|---|---|
| Name | NO. | Amino Acid Sequence |
| AE144 | 156 | GSEPATSGSETPGTSESATPESGPGSEPATSGSETPGSPAGSPTSTEEGTST |
| | | EPSEGSAPGSEPATSGSETPGSEPATSGSETPGSEPATSGSETPGTSTEPSE |
| | | GSAPGTSESATPESGPGSEPATSGSETPGTSTEPSEGSAP |
| AE144_1A | 157 | SPAGSPTSTEEGTSESATPESGPGTSTEPSEGSAPGSPAGSPTSTEEGTSTE |
| | | PSEGSAPGTSTEPSEGSAPGTSESATPESGPGSEPATSGSETPGSEPATSGS |
| | | ETPGSPAGSPTSTEEGTSESATPESGPGTSTEPSEGSAPG |
| AE144_2A | 158 | TSTEPSEGSAPGSPAGSPTSTEEGTSTEPSEGSAPGTSTEPSEGSAPGTSES |
| | | ATPESGPGTSTEPSEGSAPGTSESATPESGPGSEPATSGSETPGTSTEPSEG |
| | | SAPGTSTEPSEGSAPGTSESATPESGPGTSESATPESGPG |
| AE144_2B | 159 | TSTEPSEGSAPGSPAGSPTSTEEGTSTEPSEGSAPGTSTEPSEGSAPGTSES |
| | | ATPESGPGTSTEPSEGSAPGTSESATPESGPGSEPATSGSETPGTSTEPSEG |
| | | SAPGTSTEPSEGSAPGTS ESATPESGPGTSESATPESGPG |
| AE144_3A | 160 | SPAGSPTSTEEGTSESATPESGPGSEPATSGSETPGTSESATPESGPGTSTE |
| | | PSEGSAPGTSTEPSEGSAPGTSTEPSEGSAPGTSTEPSEGSAPGTSTEPSEG |
| | | SAPGTSTEPSEGSAPGSPAGSPTSTEEGTSTEPSEGSAPG |
| AE144_3B | 161 | SPAGSPTSTEEGTSESATPESGPGSEPATSGSETPGTSESATPESGPGTSTE |
| | | PSEGSAPGTSTEPSEGSAPGTSTEPSEGSAPGTSTEPSEGSAPGTSTEPSEG |
| | | SAPGTSTEPSEGSAPGSPAGSPTSTEEGTSTEPSEGSAPG |
| AE144_4A | 162 | TSESATPESGPGSEPATSGSETPGTSESATPESGPGSEPATSGSETPGTSES |
| | | ATPESGPGTSTEPSEGSAPGTSESATPESGPGSPAGSPTSTEEGSPAGSPTS |
| | | TEEGSPAGSPTSTEEGTSESATPESGPGTSTEPSEGSAPG |
| AE144_4B | 163 | TSESATPESGPGSEPATSGSETPGTSESATPESGPGSEPATSGSETPGTSES |
| | | ATPESGPGTSTEPSEGSAPGTSESATPESGPGSPAGSPTSTEEGSPAGSPTS |
| | | TEEGSPAGSPTSTEEGTSESATPESGPGTSTEPSEGSAPG |
| AE144_5A | 164 | TSESATPESGPGSEPATSGSETPGTSESATPESGPGSEPATSGSETPGTSES |
| | | ATPESGPGTSTEPSEGSAPGSPAGSPTSTEEGTSESATPESGPGSEPATSGS |
| | | ETPGTSESATPESGPGSPAGSPTSTEEGSPAGSPTSTEEG |
| AE144_6B | 165 | TSTEPSEGSAPGTSESATPESGPGTSESATPESGPGTSESATPESGPGSEPA |
| | | TSGSETPGSEPATSGSETPGSPAGSPTSTEEGTSTEPSEGSAPGTSTEPSEG |
| | | SAPGSEPATSGSETPGTSESATPESGPGTSTEPSEGSAPG |
| AE288_1 | 166 | GTSESATPESGPGSEPATSGSETPGTSESATPESGPGSEPATSGSETPGTSE |
| | | SATPESGPGTSTEPSEGSAPGSPAGSPTSTEEGTSESATPESGPGSEPATSG |
| | | SETPGTSESATPESGPGSPAGSPTSTEEGSPAGSPTSTEEGTSTEPSEGSAP |
| | | GTSESATPESGPGTSESATPESGPGTSESATPESGPGSEPATSGSETPGSEP |
| | | ATSGSETPGSPAGSPTSTEEGTSTEPSEGSAPGTSTEPSEGSAPGSEPATSG |
| | | SETPGTSESATPESGPGTSTEPSEGSAP |
| AE288_2 | 167 | GSPAGSPTSTEEGTSESATPESGPGSEPATSGSETPGTSESATPESGPGTST |
| | | EPSEGSAPGTSTEPSEGSAPGTSTEPSEGSAPGTSTEPSEGSAPGTSTEPSE |
| | | GSAPGTSTEPSEGSAPGSPAGSPTSTEEGTSTEPSEGSAPGTSESATPESGP |
| | | GSEPATSGSETPGTSESATPESGPGSEPATSGSETPGTSESATPESGPGTST |
| | | EPSEGSAPGTSESATPESGPGSPAGSPTSTEEGSPAGSPTSTEEGSPAGSPT |
| | | STEEGTSESATPESGPGTSTEPSEGSAP |
| AE576 | 168 | GSPAGSPTSTEEGTSESATPESGPGTSTEPSEGSAPGSPAGSPTSTEEGTST |
| | | EPSEGSAPGTSTEPSEGSAPGTSESATPESGPGSEPATSGSETPGSEPATSG |
| | | SETPGSPAGSPTSTEEGTSESATPESGPGTSTEPSEGSAPGTSTEPSEGSAP |
| | | GSPAGSPTSTEEGTSTEPSEGSAPGTSTEPSEGSAPGTSESATPESGPGTST |
| | | EPSEGSAPGTSESATPESGPGSEPATSGSETPGTSTEPSEGSAPGTSTEPSE |
| | | GSAPGTSESATPESGPGTSESATPESGPGSPAGSPTSTEEGTSESATPESGP |
| | | GSEPATSGSETPGTSESATPESGPGTSTEPSEGSAPGTSTEPSEGSAPGTST |
| | | EPSEGSAPGTSTEPSEGSAPGTSTEPSEGSAPGTSTEPSEGSAPGSPAGSPT |
| | | STEEGTSTEPSEGSAPGTSESATPESGPGSEPATSGSETPGTSESATPESGP |
| | | GSEPATSGSETPGTSESATPESGPGTSTEPSEGSAPGTSESATPESGPGSPA |
| | | GSPTSTEEGSPAGSPTSTEEGSPAGSPTSTEEGTSESATPESGPGTSTEPSE |
| | | GSAP |
| AE624 | 169 | MAEPAGSPTSTEEGTPGSGTASSSPGSSTPSGATGSPGASPGTSSTGSPGS |
| | | PAGSPTSTEEGTSESATPESGPGTSTEPSEGSAPGSPAGSPTSTEEGTSTEP |
| | | SEGSAPGTSTEPSEGSAPGTSESATPESGPGSEPATSGSETPGSEPATSGSE |
| | | TPGSPAGSPTSTEEGTSESATPESGPGTSTEPSEGSAPGTSTEPSEGSAPGS |
| | | PAGSPTSTEEGTSTEPSEGSAPGTSTEPSEGSAPGTSESATPESGPGTSTEP |
| | | SEGSAPGTSESATPESGPGSEPATSGSETPGTSTEPSEGSAPGTSTEPSEGS |
| | | APGTSESATPESGPGTSESATPESGPGSPAGSPTSTEEGTSESATPESGPGS |
| | | EPATSGSETPGTSESATPESGPGTSTEPSEGSAPGTSTEPSEGSAPGTSTEP |
| | | SEGSAPGTSTEPSEGSAPGTSTEPSEGSAPGTSTEPSEGSAPGSPAGSPTST |
| | | EEGTSTEPSEGSAPGTSESATPESGPGSEPATSGSETPGTSESATPESGPGS |
| | | EPATSGSETPGTSESATPESGPGTSTEPSEGSAPGTSESATPESGPGSPAGS |
| | | PTSTEEGSPAGSPTSTEEGSPAGSPTSTEEGTSESATPESGPGTSTEPSEGS |
| | | AP |
| AE864 | 170 | GSPAGSPTSTEEGTSESATPESGPGTSTEPSEGSAPGSPAGSPTSTEEGTST |
| | | EPSEGSAPGTSTEPSEGSAPGTSESATPESGPGSEPATSGSETPGSEPATSG |
| | | SETPGSPAGSPTSTEEGTSESATPESGPGTSTEPSEGSAPGTSTEPSEGSAP |
| | | GSPAGSPTSTEEGTSTEPSEGSAPGTSTEPSEGSAPGTSESATPESGPGTST |
| | | EPSEGSAPGTSESATPESGPGSEPATSGSETPGTSTEPSEGSAPGTSTEPSE |
| | | GSAPGTSESATPESGPGTSESATPESGPGSPAGSPTSTEEGTSESATPESGP |
| | | GSEPATSGSETPGTSESATPESGPGTSTEPSEGSAPGTSTEPSEGSAPGTST |
| | | EPSEGSAPGTSTEPSEGSAPGTSTEPSEGSAPGTSTEPSEGSAPGSPAGSPT |
| | | STEEGTSTEPSEGSAPGTSESATPESGPGSEPATSGSETPGTSESATPESGP |
| | | GSEPATSGSETPGTSESATPESGPGTSTEPSEGSAPGTSESATPESGPGSPA |
| | | GSPTSTEEGSPAGSPTSTEEGSPAGSPTSTEEGTSESATPESGPGTSTEPSE |
| | | GSAPGTSESATPESGPGSEPATSGSETPGTSESATPESGPGSEPATSGSETP |
| | | GTSESATPESGPGTSTEPSEGSAPGSPAGSPTSTEEGTSESATPESGPGSEP |
| | | ATSGSETPGTSESATPESGPGSPAGSPTSTEEGSPAGSPTSTEEGTSTEPSE |
| | | GSAPGTSESATPESGPGTSESATPESGPGTSESATPESGPGSEPATSGSETP |
| | | GSEPATSGSETPGSPAGSPTSTEEGTSTEPSEGSAPGTSTEPSEGSAPGSEP |
| | | ATSGSETPGTSESATPESGPGTSTEPSEGSAP |
| AE865 | 171 | GGSPAGSPTSTEEGTSESATPESGPGTSTEPSEGSAPGSPAGSPTSTEEGTS |
| | | TEPSEGSAPGTSTEPSEGSAPGTSESATPESGPGSEPATSGSETPGSEPATS |
| | | GSETPGSPAGSPTSTEEGTSESATPESGPGTSTEPSEGSAPGTSTEPSEGSA |
| | | PGSPAGSPTSTEEGTSTEPSEGSAPGTSTEPSEGSAPGTSESATPESGPGTS |
| | | TEPSEGSAPGTSESATPESGPGSEPATSGSETPGTSTEPSEGSAPGTSTEPS |
| | | EGSAPGTSESATPESGPGTSESATPESGPGSPAGSPTSTEEGTSESATPESG |
| | | PGSEPATSGSETPGTSESATPESGPGTSTEPSEGSAPGTSTEPSEGSAPGTS |
| | | TEPSEGSAPGTSTEPSEGSAPGTSTEPSEGSAPGTSTEPSEGSAPGSPAGSP |
| | | TSTEEGTSTEPSEGSAPGTSESATPESGPGSEPATSGSETPGTSESATPESG |
| | | PGSEPATSGSETPGTSESATPESGPGTSTEPSEGSAPGTSESATPESGPGSP |
| | | AGSPTSTEEGSPAGSPTSTEEGSPAGSPTSTEEGTSESATPESGPGTSTEPS |
| | | EGSAPGTSESATPESGPGSEPATSGSETPGTSESATPESGPGSEPATSGSET |
| | | PGTSESATPESGPGTSTEPSEGSAPGSPAGSPTSTEEGTSESATPESGPGSE |
| | | PATSGSETPGTSESATPESGPGSPAGSPTSTEEGSPAGSPTSTEEGTSTEPS |
| | | EGSAPGTSESATPESGPGTSESATPESGPGTSESATPESGPGSEPATSGSET |
| | | PGSEPATSGSETPGSPAGSPTSTEEGTSTEPSEGSAPGTSTEPSEGSAPGSE |
| | | PATSGSETPGTSESATPESGPGTSTEPSEGSAP |
| AE866 | 172 | PGSPAGSPTSTEEGTSESATPESGPGTSTEPSEGSAPGSPAGSPTSTEEGTS |
| | | TEPSEGSAPGTSTEPSEGSAPGTSESATPESGPGSEPATSGSETPGSEPATS |
| | | GSETPGSPAGSPTSTEEGTSESATPESGPGTSTEPSEGSAPGTSTEPSEGSA |
| | | PGSPAGSPTSTEEGTSTEPSEGSAPGTSTEPSEGSAPGTSESATPESGPGTS |
| | | TEPSEGSAPGTSESATPESGPGSEPATSGSETPGTSTEPSEGSAPGTSTEPS |
| | | EGSAPGTSESATPESGPGTSESATPESGPGSPAGSPTSTEEGTSESATPESG |
| | | PGSEPATSGSETPGTSESATPESGPGTSTEPSEGSAPGTSTEPSEGSAPGTS |
| | | TEPSEGSAPGTSTEPSEGSAPGTSTEPSEGSAPGTSTEPSEGSAPGSPAGSP |
| | | TSTEEGTSTEPSEGSAPGTSESATPESGPGSEPATSGSETPGTSESATPESG |
| | | PGSEPATSGSETPGTSESATPESGPGTSTEPSEGSAPGTSESATPESGPGSP |
| | | AGSPTSTEEGSPAGSPTSTEEGSPAGSPTSTEEGTSESATPESGPGTSTEPS |
| | | EGSAPGTSESATPESGPGSEPATSGSETPGTSESATPESGPGSEPATSGSET |
| | | PGTSESATPESGPGTSTEPSEGSAPGSPAGSPTSTEEGTSESATPESGPGSE |
| | | PATSGSETPGTSESATPESGPGSPAGSPTSTEEGSPAGSPTSTEEGTSTEPS |
| | | EGSAPGTSESATPESGPGTSESATPESGPGTSESATPESGPGSEPATSGSET |
| | | PGSEPATSGSETPGSPAGSPTSTEEGTSTEPSEGSAPGTSTEPSEGSAPGSE |
| | | PATSGSETPGTSESATPESGPGTSTEPSEGSAPG |
| AE1152 | 173 | GSPAGSPTSTEEGTSESATPESGPGTSTEPSEGSAPGSPAGSPTSTEEGTST |
| | | EPSEGSAPGTSTEPSEGSAPGTSESATPESGPGSEPATSGSETPGSEPATSG |
| | | SETPGSPAGSPTSTEEGTSESATPESGPGTSTEPSEGSAPGTSTEPSEGSAP |
| | | GSPAGSPTSTEEGTSTEPSEGSAPGTSTEPSEGSAPGTSESATPESGPGTST |
| | | EPSEGSAPGTSESATPESGPGSEPATSGSETPGTSTEPSEGSAPGTSTEPSE |
| | | GSAPGTSESATPESGPGTSESATPESGPGSPAGSPTSTEEGTSESATPESGP |
| | | GSEPATSGSETPGTSESATPESGPGTSTEPSEGSAPGTSTEPSEGSAPGTST |
| | | EPSEGSAPGTSTEPSEGSAPGTSTEPSEGSAPGTSTEPSEGSAPGSPAGSPT |
| | | STEEGTSTEPSEGSAPGTSESATPESGPGSEPATSGSETPGTSESATPESGP |
| | | GSEPATSGSETPGTSESATPESGPGTSTEPSEGSAPGTSESATPESGPGSPA |
| | | GSPTSTEEGSPAGSPTSTEEGSPAGSPTSTEEGTSESATPESGPGTSTEPSE |
| | | GSAPGTSESATPESGPGSEPATSGSETPGTSESATPESGPGSEPATSGSETP |
| | | GTSESATPESGPGTSTEPSEGSAPGSPAGSPTSTEEGTSESATPESGPGSEP |
| | | ATSGSETPGTSESATPESGPGSPAGSPTSTEEGSPAGSPTSTEEGTSTEPSE |
| | | GSAPGTSESATPESGPGTSESATPESGPGTSESATPESGPGSEPATSGSETP |
| | | GSEPATSGSETPGSPAGSPTSTEEGTSTEPSEGSAPGTSTEPSEGSAPGSEP |
| | | ATSGSETPGTSESATPESGPGTSTEPSEGSAPGTSESATPESGPGSEPATSG |
| | | SETPGTSESATPESGPGSEPATSGSETPGTSESATPESGPGTSTEPSEGSAP |
| | | GSPAGSPTSTEEGTSESATPESGPGSEPATSGSETPGTSESATPESGPGSPA |
| | | GSPTSTEEGSPAGSPTSTEEGTSTEPSEGSAPGTSESATPESGPGTSESATP |
| | | ESGPGTSESATPESGPGSEPATSGSETPGSEPATSGSETPGSPAGSPTSTEE |
| | | GTSTEPSEGSAPGTSTEPSEGSAPGSEPATSGSETPGTSESATPESGPGTST |
| | | EPSEGSAP |
| AE144 | 174 | STEPSEGSAPGSPAGSPTSTEEGTSTEPSEGSAPGTSESATPESGPGSEPAT |
| A | | SGSETPGTSESATPESGPGSEPATSGSETPGTSESATPESGPGTSTEPSEGS |
| | | APGTSESATPESGPGSPAGSPTSTEEGSPAGSPTSTEEGS |
| AE144 | 175 | SEPATSGSETPGTSESATPESGPGSEPATSGSETPGTSESATPESGPGTSTE |
| B | | PSEGSAPGSPAGSPTSTEEGTSESATPESGPGSEPATSGSETPGTSESATPE |
| | | SGPGSPAGSPTSTEEGSPAGSPTSTEEGTSTEPSEGSAPG |
| AE180 | 176 | TSTEEGTSESATPESGPGSEPATSGSETPGTSESATPESGPGSPAGSPTSTE |
| A | | EGSPAGSPTSTEEGTSTEPSEGSAPGTSESATPESGPGTSESATPESGPGTS |
| | | ESATPESGPGSEPATSGSETPGSEPATSGSETPGSPAGSPTSTEEGTSTEPS |
| | | EGSAPGTSTEPSEGSAPGSEPATS |
| AE216 | 177 | PESGPGTSTEPSEGSAPGSPAGSPTSTEEGTSESATPESGPGSEPATSGSET |
| A | | PGTSESATPESGPGSPAGSPTSTEEGSPAGSPTSTEEGTSTEPSEGSAPGTS |
| | | ESATPESGPGTSESATPESGPGTSESATPESGPGSEPATSGSETPGSEPATS |
| | | GSETPGSPAGSPTSTEEGTSTEPSEGSAPGTSTEPSEGSAPGSEPATSGSET |
| | | PGTSESAT |
| AE252 | 178 | ESGPGSEPATSGSETPGTSESATPESGPGTSTEPSEGSAPGSPAGSPTSTEE |
| A | | GTSESATPESGPGSEPATSGSETPGTSESATPESGPGSPAGSPTSTEEGSPA |
| | | GSPTSTEEGTSTEPSEGSAPGTSESATPESGPGTSESATPESGPGTSESATP |
| | | ESGPGSEPATSGSETPGSEPATSGSETPGSPAGSPTSTEEGTSTEPSEGSAP |
| | | GTSTEPSEGSAPGSEPATSGSETPGTSESATPESGPGTSTEPSE |
| AE288 | 179 | TPESGPGTSTEPSEGSAPGTSESATPESGPGSEPATSGSETPGTSESATPES |
| A | | GPGSEPATSGSETPGTSESATPESGPGTSTEPSEGSAPGSPAGSPTSTEEGT |
| | | SESATPESGPGSEPATSGSETPGTSESATPESGPGSPAGSPTSTEEGSPAGS |
| | | PTSTEEGTSTEPSEGSAPGTSESATPESGPGTSESATPESGPGTSESATPES |
| | | GPGSEPATSGSETPGSEPATSGSETPGSPAGSPTSTEEGTSTEPSEGSAPGT |
| | | STEPSEGSAPGSEPATSGSETPGTSESA |
| AE324 | 180 | PESGPGSPAGSPTSTEEGSPAGSPTSTEEGSPAGSPTSTEEGTSESATPESG |
| A | | PGTSTEPSEGSAPGTSESATPESGPGSEPATSGSETPGTSESATPESGPGSE |
| | | PATSGSETPGTSESATPESGPGTSTEPSEGSAPGSPAGSPTSTEEGTSESAT |
| | | PESGPGSEPATSGSETPGTSESATPESGPGSPAGSPTSTEEGSPAGSPTSTE |
| | | EGTSTEPSEGSAPGTSESATPESGPGTSESATPESGPGTSESATPESGPGSE |
| | | PATSGSETPGSEPATSGSETPGSPAGSPTSTEEGTSTEPSEGSAPGTSTEPS |
| | | EGSAPGSEPATS |
| AE360 | 181 | PESGPGTSTEPSEGSAPGTSESATPESGPGSPAGSPTSTEEGSPAGSPTSTE |
| A | | EGSPAGSPTSTEEGTSESATPESGPGTSTEPSEGSAPGTSESATPESGPGSE |
| | | PATSGSETPGTSESATPESGPGSEPATSGSETPGTSESATPESGPGTSTEPS |
| | | EGSAPGSPAGSPTSTEEGTSESATPESGPGSEPATSGSETPGTSESATPESG |
| | | PGSPAGSPTSTEEGSPAGSPTSTEEGTSTEPSEGSAPGTSESATPESGPGTS |
| | | ESATPESGPGTSESATPESGPGSEPATSGSETPGSEPATSGSETPGSPAGSP |
| | | TSTEEGTSTEPSEGSAPGTSTEPSEGSAPGSEPATSGSETPGTSESAT |
| AE396 | 182 | PESGPGSEPATSGSETPGTSESATPESGPGTSTEPSEGSAPGTSESATPESG |
| A | | PGSPAGSPTSTEEGSPAGSPTSTEEGSPAGSPTSTEEGTSESATPESGPGTS |
| | | TEPSEGSAPGTSESATPESGPGSEPATSGSETPGTSESATPESGPGSEPATS |
| | | GSETPGTSESATPESGPGTSTEPSEGSAPGSPAGSPTSTEEGTSESATPESG |
| | | PGSEPATSGSETPGTSESATPESGPGSPAGSPTSTEEGSPAGSPTSTEEGTS |
| | | TEPSEGSAPGTSESATPESGPGTSESATPESGPGTSESATPESGPGSEPATS |
| | | GSETPGSEPATSGSETPGSPAGSPTSTEEGTSTEPSEGSAPGTSTEPS |
| AE432 | 183 | EGSAPGSPAGSPTSTEEGTSTEPSEGSAPGTSESATPESGPGSEPATSGSET |
| A | | PGTSESATPESGPGSEPATSGSETPGTSESATPESGPGTSTEPSEGSAPGTS |
| | | ESATPESGPGSPAGSPTSTEEGSPAGSPTSTEEGSPAGSPTSTEEGTSESAT |
| | | PESGPGTSTEPSEGSAPGTSESATPESGPGSEPATSGSETPGTSESATPESG |
| | | PGSEPATSGSETPGTSESATPESGPGTSTEPSEGSAPGSPAGSPTSTEEGTS |
| | | ESATPESGPGSEPATSGSETPGTSESATPESGPGSPAGSPTSTEEGSPAGSP |
| | | TSTEEGTSTEPSEGSAPGTSESATPESGPGTSESATPESGPGTSESATPESG |
| | | PGSEPATSGSETPGSEPATSGSETPGSPAGSPTSTEEGTSTEPSEGSAPGTS |
| | | TEPSEGSAPGSEPATS |
| AE468 | 184 | EGSAPGTSTEPSEGSAPGTSTEPSEGSAPGSPAGSPTSTEEGTSTEPSEGSA |
| A | | PGTSESATPESGPGSEPATSGSETPGTSESATPESGPGSEPATSGSETPGTS |
| | | ESATPESGPGTSTEPSEGSAPGTSESATPESGPGSPAGSPTSTEEGSPAGSP |
| | | TSTEEGSPAGSPTSTEEGTSESATPESGPGTSTEPSEGSAPGTSESATPESG |
| | | PGSEPATSGSETPGTSESATPESGPGSEPATSGSETPGTSESATPESGPGTS |
| | | TEPSEGSAPGSPAGSPTSTEEGTSESATPESGPGSEPATSGSETPGTSESAT |
| | | PESGPGSPAGSPTSTEEGSPAGSPTSTEEGTSTEPSEGSAPGTSESATPESG |
| | | PGTSESATPESGPGTSESATPESGPGSEPATSGSETPGSEPATSGSETPGSP |
| | | AGSPTSTEEGTSTEPSEGSAPGTSTEPSEGSAPGSEPATSGSETPGTSESAT |
| AE504 | 185 | EGSAPGTSTEPSEGSAPGTSTEPSEGSAPGTSTEPSEGSAPGTSTEPSEGSA |
| A | | PGSPAGSPTSTEEGTSTEPSEGSAPGTSESATPESGPGSEPATSGSETPGTS |
| | | ESATPESGPGSEPATSGSETPGTSESATPESGPGTSTEPSEGSAPGTSESAT |
| | | PESGPGSPAGSPTSTEEGSPAGSPTSTEEGSPAGSPTSTEEGTSESATPESG |
| | | PGTSTEPSEGSAPGTSESATPESGPGSEPATSGSETPGTSESATPESGPGSE |
| | | PATSGSETPGTSESATPESGPGTSTEPSEGSAPGSPAGSPTSTEEGTSESAT |
| | | PESGPGSEPATSGSETPGTSESATPESGPGSPAGSPTSTEEGSPAGSPTSTE |
| | | EGTSTEPSEGSAPGTSESATPESGPGTSESATPESGPGTSESATPESGPGSE |
| | | PATSGSETPGSEPATSGSETPGSPAGSPTSTEEGTSTEPSEGSAPGTSTEPS |
| | | EGSAPGSEPATSGSETPGTSESATPESGPGTSTEPS |
| AE540 | 186 | TPESGPGSPAGSPTSTEEGTSESATPESGPGSEPATSGSETPGTSESATPES |
| A | | GPGTSTEPSEGSAPGTSTEPSEGSAPGTSTEPSEGSAPGTSTEPSEGSAPG |
| | | TSTEPSEGSAPGTSTEPSEGSAPGSPAGSPTSTEEGTSTEPSEGSAPGTSES |
| | | ATPESGPGSEPATSGSETPGTSESATPESGPGSEPATSGSETPGTSESATPE |
| | | SGPGTSTEPSEGSAPGTSESATPESGPGSPAGSPTSTEEGSPAGSPTSTEEG |
| | | SPAGSPTSTEEGTSESATPESGPGTSTEPSEGSAPGTSESATPESGPGSEPA |
| | | TSGSETPGTSESATPESGPGSEPATSGSETPGTSESATPESGPGTSTEPSEG |
| | | SAPGSPAGSPTSTEEGTSESATPESGPGSEPATSGSETPGTSESATPESGPG |
| | | SPAGSPTSTEEGSPAGSPTSTEEGTSTEPSEGSAPGTSESATPESGPGTSES |
| | | ATPESGPGTSESATPESGPGSEPATSGSETPGSEPATSGSETPGSPAGSPTS |
| | | TEEGTSTEPSEGSAPGTSTEP |
| AE576 | 187 | TPESGPGTSESATPESGPGSPAGSPTSTEEGTSESATPESGPGSEPATSGSE |
| A | | TPGTSESATPESGPGTSTEPSEGSAPGTSTEPSEGSAPGTSTEPSEGSAPGT |
| | | STEPSEGSAPGTSTEPSEGSAPGTSTEPSEGSAPGSPAGSPTSTEEGTSTEP |
| | | SEGSAPGTSESATPESGPGSEPATSGSETPGTSESATPESGPGSEPATSGSE |
| | | TPGTSESATPESGPGTSTEPSEGSAPGTSESATPESGPGSPAGSPTSTEEGS |
| | | PAGSPTSTEEGSPAGSPTSTEEGTSESATPESGPGTSTEPSEGSAPGTSESA |
| | | TPESGPGSEPATSGSETPGTSESATPESGPGSEPATSGSETPGTSESATPES |
| | | GPGTSTEPSEGSAPGSPAGSPTSTEEGTSESATPESGPGSEPATSGSETPG |
| | | TSESATPESGPGSPAGSPTSTEEGSPAGSPTSTEEGTSTEPSEGSAPGTSES |
| | | ATPESGPGTSESATPESGPGTSESATPESGPGSEPATSGSETPGSEPATSGS |
| | | ETPGSPAGSPTSTEEGTSTEPSEGSAPGTSTEPSEGSAPGSEPATSGSETPG |
| | | TSESA |
| AE612 | 188 | GSETPGTSTEPSEGSAPGTSTEPSEGSAPGTSESATPESGPGTSESATPESG |
| A | | PGSPAGSPTSTEEGTSESATPESGPGSEPATSGSETPGTSESATPESGPGTS |
| | | TEPSEGSAPGTSTEPSEGSAPGTSTEPSEGSAPGTSTEPSEGSAPGTSTEPS |
| | | EGSAPGTSTEPSEGSAPGSPAGSPTSTEEGTSTEPSEGSAPGTSESATPESG |
| | | PGSEPATSGSETPGTSESATPESGPGSEPATSGSETPGTSESATPESGPGTS |
| | | TEPSEGSAPGTSESATPESGPGSPAGSPTSTEEGSPAGSPTSTEEGSPAGSP |
| | | TSTEEGTSESATPESGPGTSTEPSEGSAPGTSESATPESGPGSEPATSGSET |
| | | PGTSESATPESGPGSEPATSGSETPGTSESATPESGPGTSTEPSEGSAPGSP |
| | | AGSPTSTEEGTSESATPESGPGSEPATSGSETPGTSESATPESGPGSPAGSP |
| | | TSTEEGSPAGSPTSTEEGTSTEPSEGSAPGTSESATPESGPGTSESATPESG |
| | | PGTSESATPESGPGSEPATSGSETPGSEPATSGSETPGSPAGSPTSTEEGTS |
| | | TEPSEGSAPGTSTEPSEGSAPGSEPATSGSETPGTSESAT |
| AE648 | 189 | PESGPGTSTEPSEGSAPGTSESATPESGPGSEPATSGSETPGTSTEPSEGSA |
| A | | PGTSTEPSEGSAPGTSESATPESGPGTSESATPESGPGSPAGSPTSTEEGTS |
| | | ESATPESGPGSEPATSGSETPGTSESATPESGPGTSTEPSEGSAPGTSTEPS |
| | | EGSAPGTSTEPSEGSAPGTSTEPSEGSAPGTSTEPSEGSAPGTSTEPSEGSA |
| | | PGSPAGSPTSTEEGTSTEPSEGSAPGTSESATPESGPGSEPATSGSETPGTS |
| | | ESATPESGPGSEPATSGSETPGTSESATPESGPGTSTEPSEGSAPGTSESAT |
| | | PESGPGSPAGSPTSTEEGSPAGSPTSTEEGSPAGSPTSTEEGTSESATPESG |
| | | PGTSTEPSEGSAPGTSESATPESGPGSEPATSGSETPGTSESATPESGPGSE |
| | | PATSGSETPGTSESATPESGPGTSTEPSEGSAPGSPAGSPTSTEEGTSESAT |
| | | PESGPGSEPATSGSETPGTSESATPESGPGSPAGSPTSTEEGSPAGSPTSTE |
| | | EGTSTEPSEGSAPGTSESATPESGPGTSESATPESGPGTSESATPESGPGSE |
| | | PATSGSETPGSEPATSGSETPGSPAGSPTSTEEGTSTEPSEGSAPGTSTEPS |
| | | EGSAPGSEPATSGSETPGTSESAT |
| AE684 | 190 | EGSAPGSPAGSPTSTEEGTSTEPSEGSAPGTSTEPSEGSAPGTSESATPESG |
| A | | PGTSTEPSEGSAPGTSESATPESGPGSEPATSGSETPGTSTEPSEGSAPGTS |
| | | TEPSEGSAPGTSESATPESGPGTSESATPESGPGSPAGSPTSTEEGTSESAT |
| | | PESGPGSEPATSGSETPGTSESATPESGPGTSTEPSEGSAPGTSTEPSEGSA |
| | | PGTSTEPSEGSAPGTSTEPSEGSAPGTSTEPSEGSAPGTSTEPSEGSAPGSP |
| | | AGSPTSTEEGTSTEPSEGSAPGTSESATPESGPGSEPATSGSETPGTSESAT |
| | | PESGPGSEPATSGSETPGTSESATPESGPGTSTEPSEGSAPGTSESATPESG |
| | | PGSPAGSPTSTEEGSPAGSPTSTEEGSPAGSPTSTEEGTSESATPESGPGTS |
| | | TEPSEGSAPGTSESATPESGPGSEPATSGSETPGTSESATPESGPGSEPATS |
| | | GSETPGTSESATPESGPGTSTEPSEGSAPGSPAGSPTSTEEGTSESATPESG |
| | | PGSEPATSGSETPGTSESATPESGPGSPAGSPTSTEEGSPAGSPTSTEEGTS |
| | | TEPSEGSAPGTSESATPESGPGTSESATPESGPGTSESATPESGPGSEPATS |
| | | GSETPGSEPATSGSETPGSPAGSPTSTEEGTSTEPSEGSAPGTSTEPSEGSA |
| | | PGSEPATS |
| AE720 | 191 | TSGSETPGSEPATSGSETPGSPAGSPTSTEEGTSESATPESGPGTSTEPSEG |
| A | | SAPGTSTEPSEGSAPGSPAGSPTSTEEGTSTEPSEGSAPGTSTEPSEGSAPG |
| | | TSESATPESGPGTSTEPSEGSAPGTSESATPESGPGSEPATSGSETPGTSTE |
| | | PSEGSAPGTSTEPSEGSAPGTSESATPESGPGTSESATPESGPGSPAGSPTS |
| | | TEEGTSESATPESGPGSEPATSGSETPGTSESATPESGPGTSTEPSEGSAPG |
| | | TSTEPSEGSAPGTSTEPSEGSAPGTSTEPSEGSAPGTSTEPSEGSAPGTSTE |
| | | PSEGSAPGSPAGSPTSTEEGTSTEPSEGSAPGTSESATPESGPGSEPATSGS |
| | | ETPGTSESATPESGPGSEPATSGSETPGTSESATPESGPGTSTEPSEGSAPG |
| | | TSESATPESGPGSPAGSPTSTEEGSPAGSPTSTEEGSPAGSPTSTEEGTSES |
| | | ATPESGPGTSTEPSEGSAPGTSESATPESGPGSEPATSGSETPGTSESATPE |
| | | SGPGSEPATSGSETPGTSESATPESGPGTSTEPSEGSAPGSPAGSPTSTEEG |
| | | TSESATPESGPGSEPATSGSETPGTSESATPESGPGSPAGSPTSTEEGSPAG |
| | | SPTSTEEGTSTEPSEGSAPGTSESATPESGPGTSESATPESGPGTSESATPE |
| | | SGPGSEPATSGSETPGSEPATSGSETPGSPAGSPTSTEEGTSTE |
| AE756 | 192 | TSGSETPGSEPATSGSETPGSPAGSPTSTEEGTSESATPESGPGTSTEPSEG |
| A | | SAPGTSTEPSEGSAPGSPAGSPTSTEEGTSTEPSEGSAPGTSTEPSEGSAPG |
| | | TSESATPESGPGTSTEPSEGSAPGTSESATPESGPGSEPATSGSETPGTSTE |
| | | PSEGSAPGTSTEPSEGSAPGTSESATPESGPGTSESATPESGPGSPAGSPTS |
| | | TEEGTSESATPESGPGSEPATSGSETPGTSESATPESGPGTSTEPSEGSAPG |
| | | TSTEPSEGSAPGTSTEPSEGSAPGTSTEPSEGSAPGTSTEPSEGSAPGTSTE |
| | | PSEGSAPGSPAGSPTSTEEGTSTEPSEGSAPGTSESATPESGPGSEPATSGS |
| | | ETPGTSESATPESGPGSEPATSGSETPGTSESATPESGPGTSTEPSEGSAPG |
| | | TSESATPESGPGSPAGSPTSTEEGSPAGSPTSTEEGSPAGSPTSTEEGTSES |
| | | ATPESGPGTSTEPSEGSAPGTSESATPESGPGSEPATSGSETPGTSESATPE |
| | | SGPGSEPATSGSETPGTSESATPESGPGTSTEPSEGSAPGSPAGSPTSTEEG |
| | | TSESATPESGPGSEPATSGSETPGTSESATPESGPGSPAGSPTSTEEGSPAG |
| | | SPTSTEEGTSTEPSEGSAPGTSESATPESGPGTSESATPESGPGTSESATPE |
| | | SGPGSEPATSGSETPGSEPATSGSETPGSPAGSPTSTEEGTSTEPSEGSAPG |
| | | TSTEPSEGSAPGSEPATSGSETPGTSES |
| AE792 | 193 | EGSAPGTSESATPESGPGSEPATSGSETPGSEPATSGSETPGSPAGSPTSTE |
| A | | EGTSESATPESGPGTSTEPSEGSAPGTSTEPSEGSAPGSPAGSPTSTEEGTS |
| | | TEPSEGSAPGTSTEPSEGSAPGTSESATPESGPGTSTEPSEGSAPGTSESAT |
| | | PESGPGSEPATSGSETPGTSTEPSEGSAPGTSTEPSEGSAPGTSESATPESG |
| | | PGTSESATPESGPGSPAGSPTSTEEGTSESATPESGPGSEPATSGSETPGTS |
| | | ESATPESGPGTSTEPSEGSAPGTSTEPSEGSAPGTSTEPSEGSAPGTSTEPS |
| | | EGSAPGTSTEPSEGSAPGTSTEPSEGSAPGSPAGSPTSTEEGTSTEPSEGSA |
| | | PGTSESATPESGPGSEPATSGSETPGTSESATPESGPGSEPATSGSETPGTS |
| | | ESATPESGPGTSTEPSEGSAPGTSESATPESGPGSPAGSPTSTEEGSPAGSP |
| | | TSTEEGSPAGSPTSTEEGTSESATPESGPGTSTEPSEGSAPGTSESATPESG |
| | | PGSEPATSGSETPGTSESATPESGPGSEPATSGSETPGTSESATPESGPGTS |
| | | TEPSEGSAPGSPAGSPTSTEEGTSESATPESGPGSEPATSGSETPGTSESAT |
| | | PESGPGSPAGSPTSTEEGSPAGSPTSTEEGTSTEPSEGSAPGTSESATPESG |
| | | PGTSESATPESGPGTSESATPESGPGSEPATSGSETPGSEPATSGSETPGSP |
| | | AGSPTSTEEGTSTEPSEGSAPGTSTEPSEGSAPGSEPATSGSETPGTSESAT |
| | | PESGPGTSTEPS |
| AE828 | 194 | PESGPGTSTEPSEGSAPGSPAGSPTSTEEGTSTEPSEGSAPGTSTEPSEGSA |
| A | | PGTSESATPESGPGSEPATSGSETPGSEPATSGSETPGSPAGSPTSTEEGTS |
| | | ESATPESGPGTSTEPSEGSAPGTSTEPSEGSAPGSPAGSPTSTEEGTSTEPS |
| | | EGSAPGTSTEPSEGSAPGTSESATPESGPGTSTEPSEGSAPGTSESATPESG |
| | | PGSEPATSGSETPGTSTEPSEGSAPGTSTEPSEGSAPGTSESATPESGPGTS |
| | | ESATPESGPGSPAGSPTSTEEGTSESATPESGPGSEPATSGSETPGTSESAT |
| | | PESGPGTSTEPSEGSAPGTSTEPSEGSAPGTSTEPSEGSAPGTSTEPSEGSA |
| | | PGTSTEPSEGSAPGTSTEPSEGSAPGSPAGSPTSTEEGTSTEPSEGSAPGTS |
| | | ESATPESGPGSEPATSGSETPGTSESATPESGPGSEPATSGSETPGTSESAT |
| | | PESGPGTSTEPSEGSAPGTSESATPESGPGSPAGSPTSTEEGSPAGSPTSTE |
| | | EGSPAGSPTSTEEGTSESATPESGPGTSTEPSEGSAPGTSESATPESGPGSE |
| | | PATSGSETPGTSESATPESGPGSEPATSGSETPGTSESATPESGPGTSTEPS |
| | | EGSAPGSPAGSPTSTEEGTSESATPESGPGSEPATSGSETPGTSESATPESG |
| | | PGSPAGSPTSTEEGSPAGSPTSTEEGTSTEPSEGSAPGTSESATPESGPGTS |
| | | ESATPESGPGTSESATPESGPGSEPATSGSETPGSEPATSGSETPGSPAGSP |
| | | TSTEEGTSTEPSEGSAPGTSTEPSEGSAPGSEPATSGSETPGTSESAT |
| AE869 | 195 | GSPGSPAGSPTSTEEGTSESATPESGPGTSTEPSEGSAPGSPAGSPTSTEEG |
| | | TSTEPSEGSAPGTSTEPSEGSAPGTSESATPESGPGSEPATSGSETPGSEPA |
| | | TSGSETPGSPAGSPTSTEEGTSESATPESGPGTSTEPSEGSAPGTSTEPSEG |
| | | SAPGSPAGSPTSTEEGTSTEPSEGSAPGTSTEPSEGSAPGTSESATPESGPG |
| | | TSTEPSEGSAPGTSESATPESGPGSEPATSGSETPGTSTEPSEGSAPGTSTE |
| | | PSEGSAPGTSESATPESGPGTSESATPESGPGSPAGSPTSTEEGTSESATPE |
| | | SGPGSEPATSGSETPGTSESATPESGPGTSTEPSEGSAPGTSTEPSEGSAPG |
| | | TSTEPSEGSAPGTSTEPSEGSAPGTSTEPSEGSAPGTSTEPSEGSAPGSPAG |
| | | SPTSTEEGTSTEPSEGSAPGTSESATPESGPGSEPATSGSETPGTSESATPE |
| | | SGPGSEPATSGSETPGTSESATPESGPGTSTEPSEGSAPGTSESATPESGPG |
| | | SPAGSPTSTEEGSPAGSPTSTEEGSPAGSPTSTEEGTSESATPESGPGTSTE |
| | | PSEGSAPGTSESATPESGPGSEPATSGSETPGTSESATPESGPGSEPATSGS |
| | | ETPGTSESATPESGPGTSTEPSEGSAPGSPAGSPTSTEEGTSESATPESGPG |
| | | SEPATSGSETPGTSESATPESGPGSPAGSPTSTEEGSPAGSPTSTEEGTSTE |
| | | PSEGSAPGTSESATPESGPGTSESATPESGPGTSESATPESGPGSEPATSGS |
| | | ETPGSEPATSGSETPGSPAGSPTSTEEGTSTEPSEGSAPGTSTEPSEGSAPG |
| | | SEPATSGSETPGTSESATPESGPGTSTEPSEGSAPGR |
| AE144_R1 | 196 | SAGSPGSPAGSPTSTEEGTSESATPESGPGTSTEPSEGSAPGSPAGSPTSTE |
| | | EGTSTEPSEGSAPGTSTEPSEGSAPGTSESATPESGPGSEPATSGSETPGSE |
| | | PATSGSETPGSPAGSPTSTEEGTSESATPESGPGTESASR |
| AE288_R1 | 197 | SAGSPTGPGSEPATSGSETPGTSESATPESGPGSEPATSGSETPGTSESATP |
| | | ESGPGTSTEPSEGSAPGSPAGSPTSTEEGTSESATPESGPGSEPATSGSETP |
| | | GTSESATPESGPGSPAGSPTSTEEGSPAGSPTSTEEGTSTEPSEGSAPGTSE |
| | | SATPESGPGTSESATPESGPGTSESATPESGPGSEPATSGSETPGSEPATSG |
| | | SETPGSPAGSPTSTEEGTSTEPSEGSAPGTSTEPSEGSAPGSEPATSGSETP |
| | | GTSESATPESGPGTSTEPSEGSAPSASR |
| AE432_R1 | 198 | SAGSPGSPAGSPTSTEEGTSESATPESGPGTSTEPSEGSAPGSPAGSPTSTE |
| | | EGTSTEPSEGSAPGTSTEPSEGSAPGTSESATPESGPGSEPATSGSETPGSE |
| | | PATSGSETPGSPAGSPTSTEEGTSESATPESGPGTSTEPSEGSAPGTSTEPS |
| | | EGSAPGSPAGSPTSTEEGTSTEPSEGSAPGTSTEPSEGSAPGTSESATPESG |
| | | PGTSTEPSEGSAPGTSESATPESGPGSEPATSGSETPGTSTEPSEGSAPGTS |
| | | TEPSEGSAPGTSESATPESGPGTSESATPESGPGSPAGSPTSTEEGTSESAT |
| | | PESGPGSEPATSGSETPGTSESATPESGPGTSTEPSEGSAPGTSTEPSEGSA |
| | | PGTSTEPSEGSAPGTSTEPSEGSAPGTSTEPSEGSAPGTSTEPSEGSAPGSP |
| | | AGSPTSTEEGTESASR |
| AE576_R1 | 199 | SAGSPTEEGTSESATPESGPGSEPATSGSETPGTSESATPESGPGTSTEPSE |
| | | GSAPGTSTEPSEGSAPGTSTEPSEGSAPGTSTEPSEGSAPGTSTEPSEGSAP |
| | | GTSTEPSEGSAPGSPAGSPTSTEEGTSTEPSEGSAPGTSESATPESGPGSEP |
| | | ATSGSETPGTSESATPESGPGSEPATSGSETPGTSESATPESGPGTSTEPSE |
| | | GSAPGTSESATPESGPGSPAGSPTSTEEGSPAGSPTSTEEGSPAGSPTSTEE |
| | | GTSESATPESGPGTSTEPSEGSAPGTSESATPESGPGSEPATSGSETPGTSE |
| | | SATPESGPGSEPATSGSETPGTSESATPESGPGTSTEPSEGSAPGSPAGSPT |
| | | STEEGTSESATPESGPGSEPATSGSETPGTSESATPESGPGSPAGSPTSTEE |
| | | GSPAGSPTSTEEGTSTEPSEGSAPGTSESATPESGPGTSESATPESGPGTSE |
| | | SATPESGPGSEPATSGSETPGSEPATSGSETPGSPAGSPTSTEEGTSTEPSE |
| | | GSAPGTSTEPSEGSAPGSEPATSGSETPGTSESATPESGPGTSTEPSEGSAP |
| | | SASR |
| AE864_R1 | 200 | SAGSPGSPAGSPTSTEEGTSESATPESGPGTSTEPSEGSAPGSPAGSPTSTE |
| | | EGTSTEPSEGSAPGTSTEPSEGSAPGTSESATPESGPGSEPATSGSETPGSE |
| | | PATSGSETPGSPAGSPTSTEEGTSESATPESGPGTSTEPSEGSAPGTSTEPS |
| | | EGSAPGSPAGSPTSTEEGTSTEPSEGSAPGTSTEPSEGSAPGTSESATPESG |
| | | PGTSTEPSEGSAPGTSESATPESGPGSEPATSGSETPGTSTEPSEGSAPGTS |
| | | TEPSEGSAPGTSESATPESGPGTSESATPESGPGSPAGSPTSTEEGTSESAT |
| | | PESGPGSEPATSGSETPGTSESATPESGPGTSTEPSEGSAPGTSTEPSEGSA |
| | | PGTSTEPSEGSAPGTSTEPSEGSAPGTSTEPSEGSAPGTSTEPSEGSAPGSP |
| | | AGSPTSTEEGTSTEPSEGSAPGTSESATPESGPGSEPATSGSETPGTSESAT |
| | | PESGPGSEPATSGSETPGTSESATPESGPGTSTEPSEGSAPGTSESATPESG |
| | | PGSPAGSPTSTEEGSPAGSPTSTEEGSPAGSPTSTEEGTSESATPESGPGTS |
| | | TEPSEGSAPGTSESATPESGPGSEPATSGSETPGTSESATPESGPGSEPATS |
| | | GSETPGTSESATPESGPGTSTEPSEGSAPGSPAGSPTSTEEGTSESATPESG |
| | | PGSEPATSGSETPGTSESATPESGPGSPAGSPTSTEEGSPAGSPTSTEEGTS |
| | | TEPSEGSAPGTSESATPESGPGTSESATPESGPGTSESATPESGPGSEPATS |
| | | GSETPGSEPATSGSETPGSPAGSPTSTEEGTSTEPSEGSAPGTSTEPSEGSA |
| | | PGSEPATSGSETPGTSESATPESGPGTESASR |
| AE712 | 201 | PGSPAGSPTSTEEGTSESATPESGPGTSTEPSEGSAPGSPAGSPTSTEEGTS |
| | | TEPSEGSAPGTSTEPSEGSAPGTSESATPESGPGSEPATSGSETPGSEPATS |
| | | GSETPGSPAGSPTSTEEGTSESATPESGPGTSTEPSEGSAPGTSTEPSEGSA |
| | | PGSPAGSPTSTEEGTSTEPSEGSAPGTSTEPSEGSAPGTSESATPESGPGTS |
| | | TEPSEGSAPGTSESATPESGPGSEPATSGSETPGTSTEPSEGSAPGTSTEPS |
| | | EGSAPGTSESATPESGPGTSESATPESGPGSPAGSPTSTEEGTSESATPESG |
| | | PGSEPATSGSETPGTSESATPESGPGTSTEPSEGSAPGTSTEPSEGSAPGTS |
| | | TEPSEGSAPGTSTEPSEGSAPGTSTEPSEGSAPGTSTEPSEGSAPGSPAGSP |
| | | TSTEEGTSTEPSEGSAPGTSESATPESGPGSEPATSGSETPGTSESATPESG |
| | | PGSEPATSGSETPGTSESATPESGPGTSTEPSEGSAPGTSESATPESGPGSP |
| | | AGSPTSTEEGSPAGSPTSTEEGSPAGSPTSTEEGTSESATPESGPGTSTEPS |
| | | EGSAPGTSESATPESGPGSEPATSGSETPGTSESATPESGPGSEPATSGSET |
| | | PGTSESATPESGPGTSTEPSEGSAPGSPAGSPTSTEEGTSESATPESGPGSE |
| | | PATSGSETPGTSESATPESGPGSPAGSPTSTEAHHH |
| AE864_R2 | 202 | GSPGAGSPAGSPTSTEEGTSESATPESGPGTSTEPSEGSAPGSPAGSPTSTE |
| | | EGTSTEPSEGSAPGTSTEPSEGSAPGTSESATPESGPGSEPATSGSETPGSE |
| | | PATSGSETPGSPAGSPTSTEEGTSESATPESGPGTSTEPSEGSAPGTSTEPS |
| | | EGSAPGSPAGSPTSTEEGTSTEPSEGSAPGTSTEPSEGSAPGTSESATPESG |
| | | PGTSTEPSEGSAPGTSESATPESGPGSEPATSGSETPGTSTEPSEGSAPGTS |
| | | TEPSEGSAPGTSESATPESGPGTSESATPESGPGSPAGSPTSTEEGTSESAT |
| | | PESGPGSEPATSGSETPGTSESATPESGPGTSTEPSEGSAPGTSTEPSEGSA |
| | | PGTSTEPSEGSAPGTSTEPSEGSAPGTSTEPSEGSAPGTSTEPSEGSAPGSP |
| | | AGSPTSTEEGTSTEPSEGSAPGTSESATPESGPGSEPATSGSETPGTSESAT |
| | | PESGPGSEPATSGSETPGTSESATPESGPGTSTEPSEGSAPGTSESATPESG |
| | | PGSPAGSPTSTEEGSPAGSPTSTEEGSPAGSPTSTEEGTSESATPESGPGTS |
| | | TEPSEGSAPGTSESATPESGPGSEPATSGSETPGTSESATPESGPGSEPATS |
| | | GSETPGTSESATPESGPGTSTEPSEGSAPGSPAGSPTSTEEGTSESATPESG |
| | | PGSEPATSGSETPGTSESATPESGPGSPAGSPTSTEEGSPAGSPTSTEEGTS |
| | | TEPSEGSAPGTSESATPESGPGTSESATPESGPGTSESATPESGPGSEPATS |
| | | GSETPGSEPATSGSETPGSPAGSPTSTEEGTSTEPSEGSAPGTSTEPSEGSA |
| | | PGSEPATSGSETPGTSESATPESGPGTESASR |
| AE288_3 | 203 | SPAGSPTSTEEGTSESATPESGPGTSTEPSEGSAPGTSESATPESGPGSEPA |
| | | TSGSETPGTSESATPESGPGSEPATSGSETPGTSESATPESGPGTSTEPSEG |
| | | SAPGSPAGSPTSTEEGTSESATPESGPGSEPATSGSETPGTSESATPESGPG |
| | | SPAGSPTSTEEGSPAGSPTSTEEGTSTEPSEGSAPGTSESATPESGPGTSES |
| | | ATPESGPGTSESATPESGPGSEPATSGSETPGSEPATSGSETPGSPAGSPTS |
| | | TEEGTSTEPSEGSAPGTSTEPSEGSAPG |
| AE284 | 204 | GTSESATPESGPGSEPATSGSETPGTSESATPESGPGSEPATSGSETPGTSE |
| | | SATPESGPGTSTEPSEGSAPGSPAGSPTSTEEGTSESATPESGPGSEPATSG |
| | | SETPGTSESATPESGPGSPAGSPTSTEEGSPAGSPTSTEEGTSTEPSEGSAP |
| | | GTSESATPESGPGTSESATPESGPGTSESATPESGPGSEPATSGSETPGSEP |
| | | ATSGSETPGSPAGSPTSTEEGTSTEPSEGSAPGTSTEPSEGSAPGSEPATSG |
| | | SETPGTSESATPESGPGTSTEPSE |
| AE292 | 205 | SPAGSPTSTEEGTSESATPESGPGTSTEPSEGSAPGTSESATPESGPGSEPA |
| | | TSGSETPGTSESATPESGPGSEPATSGSETPGTSESATPESGPGTSTEPSEG |
| | | SAPGSPAGSPTSTEEGTSESATPESGPGSEPATSGSETPGTSESATPESGPG |
| | | SPAGSPTSTEEGSPAGSPTSTEEGTSTEPSEGSAPGTSESATPESGPGTSES |
| | | ATPESGPGTSESATPESGPGSEPATSGSETPGSEPATSGSETPGSPAGSPTS |
| | | TEEGTSTEPSEGSAPGTSTEPSEGSAPGGSAP |
| AE293 | 206 | PGSPAGSPTSTEEGTSESATPESGPGTSTEPSEGSAPGSPAGSPTSTEEGTS |
| | | TEPSEGSAPGTSTEPSEGSAPGTSESATPESGPGSEPATSGSETPGSEPATS |
| | | GSETPGSPAGSPTSTEEGTSESATPESGPGTSTEPSEGSAPGTSTEPSEGSA |
| | | PGSPAGSPTSTEEGTSTEPSEGSAPGTSTEPSEGSAPGTSESATPESGPGTS |
| | | TEPSEGSAPGTSESATPESGPGSEPATSGSETPGTSTEPSEGSAPGTSTEPS |
| | | EGSAPGTSESATPESGPGTSESATPEGAAEPEA |
| AE300 | 207 | PGSPAGSPTSTEEGTSESATPESGPGTSTEPSEGSAPGSPAGSPTSTEEGTS |
| | | TEPSEGSAPGTSTEPSEGSAPGTSESATPESGPGSEPATSGSETPGSEPATS |
| | | GSETPGSPAGSPTSTEEGTSESATPESGPGTSTEPSEGSAPGTSTEPSEGSA |
| | | PGSPAGSPTSTEEGTSTEPSEGSAPGTSTEPSEGSAPGTSESATPESGPGTS |
| | | TEPSEGSAPGTSESATPESGPGSEPATSGSETPGTSTEPSEGSAPGTSTEPS |
| | | EGSAPGTSESATPESGPGTSESATPESGPGSPAGAAEPEA |
| AE864_2 | 208 | AGSPTSTEEGTSESATPESGPGTSTEPSEGSAPGSPAGSPTSTEEGTSTEPS |
| | | EGSAPGTSTEPSEGSAPGTSESATPESGPGSEPATSGSETPGSEPATSGSET |
| | | PGSPAGSPTSTEEGTSESATPESGPGTSTEPSEGSAPGTSTEPSEGSAPGSP |
| | | AGSPTSTEEGTSTEPSEGSAPGTSTEPSEGSAPGTSESATPESGPGTSTEPS |
| | | EGSAPGTSESATPESGPGSEPATSGSETPGTSTEPSEGSAPGTSTEPSEGSA |
| | | PGTSESATPESGPGTSESATPESGPGSPAGSPTSTEEGTSESATPESGPGSE |
| | | PATSGSETPGTSESATPESGPGTSTEPSEGSAPGTSTEPSEGSAPGTSTEPS |
| | | EGSAPGTSTEPSEGSAPGTSTEPSEGSAPGTSTEPSEGSAPGSPAGSPTSTE |
| | | EGTSTEPSEGSAPGTSESATPESGPGSEPATSGSETPGTSESATPESGPGSE |
| | | PATSGSETPGTSESATPESGPGTSTEPSEGSAPGTSESATPESGPGSPAGSP |
| | | TSTEEGSPAGSPTSTEEGSPAGSPTSTEEGTSESATPESGPGTSTEPSEGSA |
| | | PGTSESATPESGPGSEPATSGSETPGTSESATPESGPGSEPATSGSETPGTS |
| | | ESATPESGPGTSTEPSEGSAPGSPAGSPTSTEEGTSESATPESGPGSEPATS |
| | | GSETPGTSESATPESGPGSPAGSPTSTEEGSPAGSPTSTEEGTSTEPSEGSA |
| | | PGTSESATPESGPGTSESATPESGPGTSESATPESGPGSEPATSGSETPGSE |
| | | PATSGSETPGSPAGSPTSTEEGTSTEPSEGSAPGTSTEPSEGSAPGSEPATS |
| | | GSETPGTSESATPESGPGTSTEPSEGAAEPEA |
| AE867 | 209 | GSPAGSPTSTEEGTSESATPESGPGTSTEPSEGSAPGSPAGSPTSTEEGTST |
| | | EPSEGSAPGTSTEPSEGSAPGTSESATPESGPGSEPATSGSETPGSEPATSG |
| | | SETPGSPAGSPTSTEEGTSESATPESGPGTSTEPSEGSAPGTSTEPSEGSAP |
| | | GSPAGSPTSTEEGTSTEPSEGSAPGTSTEPSEGSAPGTSESATPESGPGTST |
| | | EPSEGSAPGTSESATPESGPGSEPATSGSETPGTSTEPSEGSAPGTSTEPSE |
| | | GSAPGTSESATPESGPGTSESATPESGPGSPAGSPTSTEEGTSESATPESGP |
| | | GSEPATSGSETPGTSESATPESGPGTSTEPSEGSAPGTSTEPSEGSAPGTST |
| | | EPSEGSAPGTSTEPSEGSAPGTSTEPSEGSAPGTSTEPSEGSAPGSPAGSPT |
| | | STEEGTSTEPSEGSAPGTSESATPESGPGSEPATSGSETPGTSESATPESGP |
| | | GSEPATSGSETPGTSESATPESGPGTSTEPSEGSAPGTSESATPESGPGSPA |
| | | GSPTSTEEGSPAGSPTSTEEGSPAGSPTSTEEGTSESATPESGPGTSTEPSE |
| | | GSAPGTSESATPESGPGSEPATSGSETPGTSESATPESGPGSEPATSGSETP |
| | | GTSESATPESGPGTSTEPSEGSAPGSPAGSPTSTEEGTSESATPESGPGSEP |
| | | ATSGSETPGTSESATPESGPGSPAGSPTSTEEGSPAGSPTSTEEGTSTEPSE |
| | | GSAPGTSESATPESGPGTSESATPESGPGTSESATPESGPGSEPATSGSETP |
| | | GSEPATSGSETPGSPAGSPTSTEEGTSTEPSEGSAPGTSTEPSEGSAPGSEP |
| | | ATSGSETPGTSESATPESGPGTSTEPSEGAAEPEA |
| AE867_2 | 210 | SPGSPAGSPTSTEEGTSESATPESGPGTSTEPSEGSAPGSPAGSPTSTEEGT |
| | | STEPSEGSAPGTSTEPSEGSAPGTSESATPESGPGSEPATSGSETPGSEPAT |
| | | SGSETPGSPAGSPTSTEEGTSESATPESGPGTSTEPSEGSAPGTSTEPSEGS |
| | | APGSPAGSPTSTEEGTSTEPSEGSAPGTSTEPSEGSAPGTSESATPESGPGT |
| | | STEPSEGSAPGTSESATPESGPGSEPATSGSETPGTSTEPSEGSAPGTSTEP |
| | | SEGSAPGTSESATPESGPGTSESATPESGPGSPAGSPTSTEEGTSESATPES |
| | | GPGSEPATSGSETPGTSESATPESGPGTSTEPSEGSAPGTSTEPSEGSAPG |
| | | TSTEPSEGSAPGTSTEPSEGSAPGTSTEPSEGSAPGTSTEPSEGSAPGSPAG |
| | | SPTSTEEGTSTEPSEGSAPGTSESATPESGPGSEPATSGSETPGTSESATPE |
| | | SGPGSEPATSGSETPGTSESATPESGPGTSTEPSEGSAPGTSESATPESGPG |
| | | SPAGSPTSTEEGSPAGSPTSTEEGSPAGSPTSTEEGTSESATPESGPGTSTE |
| | | PSEGSAPGTSESATPESGPGSEPATSGSETPGTSESATPESGPGSEPATSGS |
| | | ETPGTSESATPESGPGTSTEPSEGSAPGSPAGSPTSTEEGTSESATPESGPG |
| | | SEPATSGSETPGTSESATPESGPGSPAGSPTSTEEGSPAGSPTSTEEGTSTE |
| | | PSEGSAPGTSESATPESGPGTSESATPESGPGTSESATPESGPGSEPATSGS |
| | | ETPGSEPATSGSETPGSPAGSPTSTEEGTSTEPSEGSAPGTSTEPSEGSAPG |
| | | SEPATSGSETPGTSESATPESGPGTSTEPSEGSAPG |
| AE868 | 211 | PGSPAGSPTSTEEGTSESATPESGPGTSTEPSEGSAPGSPAGSPTSTEEGTS |
| | | TEPSEGSAPGTSTEPSEGSAPGTSESATPESGPGSEPATSGSETPGSEPATS |
| | | GSETPGSPAGSPTSTEEGTSESATPESGPGTSTEPSEGSAPGTSTEPSEGSA |
| | | PGSPAGSPTSTEEGTSTEPSEGSAPGTSTEPSEGSAPGTSESATPESGPGTS |
| | | TEPSEGSAPGTSESATPESGPGSEPATSGSETPGTSTEPSEGSAPGTSTEPS |
| | | EGSAPGTSESATPESGPGTSESATPESGPGSPAGSPTSTEEGTSESATPESG |
| | | PGSEPATSGSETPGTSESATPESGPGTSTEPSEGSAPGTSTEPSEGSAPGTS |
| | | TEPSEGSAPGTSTEPSEGSAPGTSTEPSEGSAPGTSTEPSEGSAPGSPAGSP |
| | | TSTEEGTSTEPSEGSAPGTSESATPESGPGSEPATSGSETPGTSESATPESG |
| | | PGSEPATSGSETPGTSESATPESGPGTSTEPSEGSAPGTSESATPESGPGSP |
| | | AGSPTSTEEGSPAGSPTSTEEGSPAGSPTSTEEGTSESATPESGPGTSTEPS |
| | | EGSAPGTSESATPESGPGSEPATSGSETPGTSESATPESGPGSEPATSGSET |
| | | PGTSESATPESGPGTSTEPSEGSAPGSPAGSPTSTEEGTSESATPESGPGSE |
| | | PATSGSETPGTSESATPESGPGSPAGSPTSTEEGSPAGSPTSTEEGTSTEPS |
| | | EGSAPGTSESATPESGPGTSESATPESGPGTSESATPESGPGSEPATSGSET |
| | | PGSEPATSGSETPGSPAGSPTSTEEGTSTEPSEGSAPGTSTEPSEGSAPGSE |
| | | PATSGSETPGTSESATPESGPGTSTEPSEGAAEPEA |
| AE584 | 212 | PGSPAGSPTSTEEGTSESATPESGPGTSTEPSEGSAPGSPAGSPTSTEEGTS |
| | | TEPSEGSAPGTSTEPSEGSAPGTSESATPESGPGSEPATSGSETPGSEPATS |
| | | GSETPGSPAGSPTSTEEGTSESATPESGPGTSTEPSEGSAPGTSTEPSEGSA |
| | | PGSPAGSPTSTEEGTSTEPSEGSAPGTSTEPSEGSAPGTSESATPESGPGTS |
| | | TEPSEGSAPGTSESATPESGPGSEPATSGSETPGTSTEPSEGSAPGTSTEPS |
| | | EGSAPGTSESATPESGPGTSESATPESGPGSPAGSPTSTEEGTSESATPESG |
| | | PGSEPATSGSETPGTSESATPESGPGTSTEPSEGSAPGTSTEPSEGSAPGTS |
| | | TEPSEGSAPGTSTEPSEGSAPGTSTEPSEGSAPGTSTEPSEGSAPGSPAGSP |
| | | TSTEEGTSTEPSEGSAPGTSESATPESGPGSEPATSGSETPGTSESATPESG |
| | | PGSEPATSGSETPGTSESATPESGPGTSTEPSEGSAPGTSESATPESGPGSP |
| | | AGSPTSTEEGSPAGSPTSTEEGSPAGSPTSTEEGTSESATPESGPGTSTEPS |
| | | EGSAPGAAEPEA |

TABLE 2c
Exemplary XTEN polypeptides

| Exemplary | SEQ ID | |
|---|---|---|
| Use | NO. | Amino Acid Sequence |
| C-terminal | 213 | PGSPAGSPTSTEEGTSESATPESGPGTSTEPSEGSAPGSPAGSPTSTEE |
| XTEN | | GTSTEPSEGSAPGTSTEPSEGSAPGTSESATPESGPGSEPATSGSETPG |
| | | SEPATSGSETPGSPAGSPTSTEEGTSESATPESGPGTSTEPSEGSAPGT |
| | | STEPSEGSAPGSPAGSPTSTEEGTSTEPSEGSAPGTSTEPSEGSAPGTS |
| | | ESATPESGPGTSTEPSEGSAPGTSESATPESGPGSEPATSGSETPGTST |
| | | EPSEGSAPGTSTEPSEGSAPGTSESATPESGPGTSESATPESGPGSPAG |
| | | SPTSTEEGTSESATPESGPGSEPATSGSETPGTSESATPESGPGTSTEP |
| | | SEGSAPGTSTEPSEGSAPGTSTEPSEGSAPGTSTEPSEGSAPGTSTEPS |
| | | EGSAPGTSTEPSEGSAPGSPAGSPTSTEEGTSTEPSEGSAPGTSESATP |
| | | ESGPGSEPATSGSETPGTSESATPESGPGSEPATSGSETPGTSESATPE |
| | | SGPGTSTEPSEGSAPGTSESATPESGPGSPAGSPTSTEEGSPAGSPTST |
| | | EEGSPAGSPTSTEEGTSESATPESGPGTSTEPSEGSAPGTSESATPESG |
| | | PGSEPATSGSETPGTSESATPESGPGSEPATSGSETPGTSESATPESGP |
| | | GTSTEPSEGSAPGSPAGSPTSTEEGTSESATPESGPGSEPATSGSETPG |
| | | TSESATPESGPGSPAGSPTSTEEGSPAGSPTSTEEGTSTEPSEGSAPGT |
| | | SESATPESGPGTSESATPESGPGftabTSESATPESGPGSEPATSGPTE |
| | | SGSEPATSGSETPGSPAGSPTSTEEGTSTEPSEGSAPGTESTPSEGSAP |
| | | GSEPATSGSETPGTSESATPESGPGTSTEPSEGSAPGEPEA |
| C-terminal | 214 | PGSPAGSPTSTEEGTSESATPESGPGTSTEPSEGSAPGSPAGSPTSTEE |
| XTEN | | GTSTEPSEGSAPGTSTEPSEGSAPGTSESATPESGPGSEPATSGSETPG |
| | | SEPATSGSETPGSPAGSPTSTEEGTSESATPESGPGTSTEPSEGSAPGT |
| | | STEPSEGSAPGSPAGSPTSTEEGTSTEPSEGSAPGTSTEPSEGSAPGTS |
| | | ESATPESGPGTSTEPSEGSAPGTSESATPESGPGSEPATSGSETPGTST |
| | | EPSEGSAPGTSTEPSEGSAPGTSESATPESGPGTSESATPESGPGSPAG |
| | | SPTSTEEGTSESATPESGPGSEPATSGSETPGTSESATPESGPGTSTEP |
| | | SEGSAPGTSTEPSEGSAPGTSTEPSEGSAPGTSTEPSEGSAPGTSTEPS |
| | | EGSAPGTSTEPSEGSAPGSPAGSPTSTEEGTSTEPSEGSAPGTSESATP |
| | | ESGPGSEPATSGSETPGTSESATPESGPGSEPATSGSETPGTSESATPE |
| | | SGPGTSTEPSEGSAPGTSESATPESGPGSPAGSPTSTEEGSPAGSPTST |
| | | EEGSPAGSPTSTEEGTSESATPESGPGTSTEPSEGSAPGTSESATPESG |
| | | PGSEPATSGSETPGTSESATPESGPGSEPATSGSETPGTSESATPESGP |
| | | GTSTEPSEGSAPGSPAGSPTSTEEGTSESATPESGPGSEPATSGSETPG |
| | | TSESATPESGPGSPAGSPTSTEEGSPAGSPTSTEEGTSTEPSEGSAPGT |
| | | SESATPESGPGTSESATPESGPGTSESATPESGPGSEPATSGPTESGSE |
| | | PATSGSETPGSPAGSPTSTEEGTSTEPSEGSAPGTSTEPSEGSAPGSEP |
| | | ATSGSETPGTSESATPESGPGTSTEPSEGSAPGEPEA |
| C-terminal | 215 | PGSPAGSPTSTEEGTSESATPESGPGTSTEPSEGSAPGSPAGSPTSTEE |
| XTEN | | GTSTEPSEGSAPGTSTEPSEGSAPGTSESATPESGPGSEPATSGSETPG |
| | | SEPATSGSETPGSPAGSPTSTEEGTSESATPESGPGTSTEPSEGSAPGT |
| | | STEPSEGSAPGSPAGSPTSTEEGTSTEPSEGSAPGTSTEPSEGSAPGTS |
| | | ESATPESGPGTSTEPSEGSAPGTSESATPESGPGSEPATSGSETPGTST |
| | | EPSEGSAPGTSTEPSEGSAPGTSESATPESGPGTSESATPESGPGSPAG |
| | | SPTSTEEGTSESATPESGPGSEPATSGSETPGTSESATPESGPGTSTEP |
| | | SEGSAPGTSTEPSEGSAPGTSTEPSEGSAPGTSTEPSEGSAPGTSTEPS |
| | | EGSAPGTSTEPSEGSAPGSPAGSPTSTEEGTSTEPSEGSAPGTSESATP |
| | | ESGPGSEPATSGSETPGTSESATPESGPGSEPATSGSETPGTSESATPE |
| | | SGPGTSTEPSEGSAPGTSESATPESGPGSPAGSPTSTEEGSPAGSPTST |
| | | EEGSPAGSPTSTEEGTSESATPESGPGTSTEPSEGSAPGTSESATPESG |
| | | PGSEPATSGSETPGTSESATPESGPGSEPATSGSETPGTSESATPESGP |
| | | GTSTEPSEGSAPGSPAGSPTSTEEGTSESATPESGPGSEPATSGSETPG |
| | | TSESATPESGPGSPAGSPTSTEEGSPAGSPTSTEEGTSTEPSEGSAPGT |
| | | SESATPESGPGTSESATPESGPGTSESATPESGPGSEPATSGSETPGSE |
| | | PATSGSETPGSPAGSPTSTEEGTSTEPSEGSAPGTESTPSEGSAPGSEP |
| | | ATSGSETPGTSESATPESGPGTSTEPSEGSAPGEPEA |
| N-terminal | 216 | ASSPAGSPTSTESGTSESATPESGPGTETEPSEGSAPGTSESATPESGP |
| XTEN | | GSEPATSGSETPGTSESATPESGPGSTPAESGSETPGTSESATPESGPG |
| | | TSTEPSEGSAPGSPAGSPTSTEEGTSESATPESGPGESPATSGSTPEGT |
| | | SESATPESGPGSPAGSPTSTEEGSPAGSPTSTEEGTSTEPSEGSAPGTS |
| | | ESATPESGPGTSESATPESGPGTSESATPESGPGSEPATSGSETPGSEP |
| | | ATSGSETPGSPAGSPTSTEEGTSTEPSEGSAPGTSTEPSEGSAPGGSAP |
| N-terminal | 217 | ASSPAGSPTSTESGTSESATPESGPGTSTEPSEGSAPGTSESATPESGP |
| XTEN | | GSEPATSGSETPGTSESATPESGPGSEPATSGSETPGTSESATPESGPG |
| | | TSTEPSEGSAPGSPAGSPTSTEEGTSESATPESGPGESPATSGSTPEGT |
| | | SESATPESGPGSPAGSPTSTEEGSPAGSPTSTEEGTSTEPSEGSAPGTS |
| | | ESATPESGPGTSESATPESGPGTSESATPESGPGSEPATSGSETPGSEP |
| | | ATSGSETPGSPAGSPTSTEEGTSTEPSEGSAPGTSTEPSEGSAPGGSAP |
| N-terminal | 218 | ASSPAGSPTSTESGTSESATPESGPGTSTEPSEGSAPGTSESATPESGP |
| XTEN | | GSEPATSGSETPGTSESATPESGPGSTPAESGSETPGTSESATPESGPG |
| | | TSTEPSEGSAPGSPAGSPTSTEEGTSESATPESGPGEEPATSGSTPEGT |
| | | SESATPESGPGSPAGSPTSTEEGSPAGSPTSTEEGTSTEPSEGSAPGTS |
| | | ESATPESGPGTSESATPESGPGTSESATPESGPGSEPATSGSETPGSEP |
| | | ATSGSETPGSPAGSPTSTEEGTSTEPSEGSAPGTSTEPSEGSAPGGSAP |
| N-terminal | 219 | ASSPAGSPTSTESGTSESATPESGPGTSTEPSEGSAPGTSESATPESGP |
| XTEN | | GSEPATSGSETPGTSESATPESGPGSTPAESGSETPGTSESATPESGPG |
| | | TSTEPSEGSAPGSPAGSPTSTEEGTSESATPESGPGSEPATSGSETPGT |
| | | SESATPESGPGSPAGSPTSTEEGSPAGSPTSTEEGTSTEPSEGSAPGTS |
| | | ESATPESGPGTSESATPESGPGTSESATPESGPGSEPATSGSETPGSEP |
| | | ATSGSETPGSPAGSPTSTEEGTSTEPSEGSAPGTSTEPSEGSAPGGSAP |
| C-terminal | 220 | PGSPAGSPTSTEEGTSESATPESGPGTSTEPSEGSAPGSPAGSPTSTEE |
| XTEN | | GTSTEPSEGSAPGTSTEPSEGSAPGTSESATPESGPGSEPATSGSETPG |
| | | SEPATSGSETPGSPAGSPTSTEEGTSESATPESGPGTSTEPSEGSAPGT |
| | | STEPSEGSAPGSPAGSPTSTEEGTSTEPSEGSAPGTSTEPSEGSAPGTS |
| | | ESATPESGPGTSTEPSEGSAPGTSESATPESGPGSEPATSGSETPGTST |
| | | EPSEGSAPGTSTEPSEGSAPGTSESATPESGPGTSESATPESGPGSPAG |
| | | SPTSTEEGTSESATPESGPGSEPATSGSETPGTSESATPESGPGTSTEP |
| | | SEGSAPGTSTEPSEGSAPGTSTEPSEGSAPGTSTEPSEGSAPGTSTEPS |
| | | EGSAPGTSTEPSEGSAPGSPAGSPTSTEEGTSTEPSEGSAPGTSESATP |
| | | ESGPGSEPATSGSETPGTSESATPESGPGSEPATSGSETPGTSESATPE |
| | | SGPGTSTEPSEGSAPGTSESATPESGPGSPAGSPTSTEEGSPAGSPTST |
| | | EEGSPAGSPTSTEEGTSESATPESGPGTSTEPSEGSAPGTSESATPESG |
| | | PGSEPATSGSETPGTSESATPESGPGSEPATSGSETPGTSESATPESGP |
| | | GTSTEPSEGSAPGSPAGSPTSTEEGTSESATPESGPGSEPATSGSETPG |
| | | TSESATPESGPGSPAGSPTSTEEGSPAGSPTSTEEGTSTEPSEGSAPGT |
| | | SESATPESGPGTSESATPESGPGTSESATPESGPGSEPATSGSETPGSE |
| | | PATSGSETPGSPAGSPTSTEEGTSTEPSEGSAPGTESTPSEGSAPGSEP |
| | | ATSGSETPGTSESATPESGPGTSTEPSEGSAPG |
| C-terminal | 221 | PGSPAGSPTSTEEGTSESATPESGPGSEPATSGSETPGTSESATPESGP |
| XTEN | | GTSTEPSEGSAPGTSTEPSEGSAPGTSTEPSEGSAPGTSTEPSEGSAPG |
| | | TSTEPSEGSAPGTSTEPSEGSAPGSPAGSPTSTEEGTSTEPSEGSAPGT |
| | | SESATPESGPGSEPATSGSETPGTSESATPESGPGSEPATSGSETPGTS |
| | | ESATPESGPGTSTEPSEGSAPGTSESATPESGPGSPAGSPTSTEEGSPA |
| | | GSPTSTEEGSPAGSPTSTEEGTSESATPESGPGTSTEPSEGSAPGTSES |
| | | ATPESGPGSEPATSGSETPGTSESATPESGPGSEPATSGSETPGTSESA |
| | | TPESGPGTSTEPSEGSAPGSPAGSPTSTEEGTSESATPESGPGSEPATS |
| | | GSETPGTSESATPESGPGSPAGSPTSTEEGSPAGSPTSTEEGTSTEPSE |
| | | GSAPGTSESATPESGPGTSESATPESGPGTSESATPESGPGSEPATSGS |
| | | ETPGSEPATSGSETPGSPAGSPTSTEEGTSTEPSEGSAPGTESTPSEGS |
| | | APGSEPATSGSETPGTSESATPESGPGTSTEPSEGSAPG |
| N-terminal | 222 | SAGSPGSPAGSPTSTEEGTSESATPESGPGTSTEPSEGSAPGSPAGSPT |
| XTEN | | STEEGTSTEPSEGSAPGTSTEPSEGSAPGTSESATPESGPGSTPAESGS |
| | | ETPGSEPATSGSETPGSPAGSPTSTEEGTSESATPESGPGTSTEPSEGS |
| | | APGTSTEPSEGSAPGSPAGSPTSTEEGTSTEPSEGSAPGTSTEPSEGSA |
| | | PGTSESATPESGPGTSTEPSEGSAPGTSESATPESGPGSEPATSGSTET |
| | | PGTSTEPSEGSAPGTSTEPSEGSAPGTSESATPESGPGTSESATPESGP |
| | | GSPAGSPTSTEEGTSESATPESGPGSEPATSGSETPGTSESATPESGPG |
| | | TSTEPSEGSAPGTSTEPSEGSAPGTSTEPSEGSAPGTSTEPSEGSAPGT |
| | | STEPSEGSAPGTSTEPSEGSAPGSPAGSPTSTEEGTSTEPSEGSAPGTS |
| | | ESATPESGPGSEPATSGSETPGTSESATPESGPGSEPATSGSETPGTSE |
| | | SATPESGPGTSTEPSEGSAPGTSESATPESGPGSPAGSPTSTEEGSPAG |
| | | SPTSTEEGSPAGSPTSTEEGTSESATPESGPGTSTEPSEGSAPGTSESA |
| | | TPESGPGSEPATSGSETPGTSESATPESGPGSEPATSGSETPGTSESAT |
| | | PESGPGTSTEPSEGSAPGSPAGSPTSTEEGTSESATPESGPGSEPATSG |
| | | SETPGTSESATPESGPGSPAGSPTSTEEGSPAGSPTSTEEGTSTEPSEG |
| | | SAPGTSESATPESGPGTSESATPESGPGTSESATPESGPGSEPATSGSE |
| | | TPGSEPATSGSETPGSPAGSPTSTEEGTSTEPSEGSAPGTSTEPSEGSA |
| | | PGSEPATSGSETPGTSESATPESGPGTSTEPSEGSAPGSPAGSPTSTEE |
| | | GTSESATPESGPGTSTEPSEGSAPGSPAGSPTSTEEGTSTEPSEGSAPG |
| | | TSTEPSEGSAPGTSESATPESGPGSEPATSGSETPGSEPATSGSETPGS |
| | | PAGSPTSTEEGTSESATPESGPGTSTEPSEGSAPGTSTEPSEGSAPGSP |
| | | AGSPTSTEEGTSTEPSEGSAPGTSTEPSEGSAPGTSESATPESGPGTST |
| | | EPSEGSAPGTSESATPESGPGSEPATSGSETPGTSTEPSEGSAPGTSTE |
| | | PSEGSAPGTSESATPESGPGTESAS |
| C-terminal | 223 | SAGSPGSPAGSPTSTEEGTSESATPESGPGTSTEPSEGSAPGSPAGSPT |
| XTEN | | STEEGTSTEPSEGSAPGTSTEPSEGSAPGTSESATPESGPGSEPATSGS |
| | | ETPGSEPATSGSETPGSPAGSPTSTEEGTSESATPESGPGTSTEPSEGS |
| | | APGTSTEPSEGSAPGSPAGSPTSTEEGTSTEPSEGSAPGTSTEPSEGSA |
| | | PGTSESATPESGPGTSTEPSEGSAPGTSESATPESGPGSEPATSGSETP |
| | | GTSTEPSEGSAPGTSTEPSEGSAPGTSESATPESGPGTSESATPESGPG |
| | | SPAGSPTSTEEGTSESATPESGPGSEPATSGSETPGTSESATPESGPGT |
| | | STEPSEGSAPGTSTEPSEGSAPGTSTEPSEGSAPGTSTEPSEGSAPGTS |
| | | TEPSEGSAPGTSTEPSEGSAPGSPAGSPTSTEEGTSTEPSEGSAPGTSE |
| | | SATPESGPGSEPATSGSETPGTSESATPESGPGSEPATSGSETPGTSES |
| | | ATPESGPGTSTEPSEGSAPGTSESATPESGPGSPAGSPTSTEEGSPAGS |
| | | PTSTEEGSPAGSPTSTEEGTSESATPESGPGTSTEPSEGSAPGTSESAT |
| | | PESGPGSEPATSGSETPGTSESATPESGPGSEPATSGSETPGTSESATP |
| | | ESGPGTSTEPSEGSAPGSPAGSPTSTEEGTSESATPESGPGSEPATSGS |
| | | ETPGTSESATPESGPGSPAGSPTSTEEGSPAGSPTSTEEGTSTEPSEGS |
| | | APGTSESATPESGPGTSESATPESGPGTSESATPESGPGSEPATSGSET |
| | | PGSEPATSGSETPGSPAGSPTSTEEGTSTEPSEGSAPGTSTEPSEGSAP |
| | | GSEPATSGSETPGTSESATPESGPGTSTEPSEGSAPGSPAGSPTSTEEG |
| | | TSESATPESGPGTSTEPSEGSAPGSPAGSPTSTEEGTSTEPSEGSAPGT |
| | | STEPSEGSAPGTSESATPESGPGSEPATSGSETPGSEPATSGSTETPGS |
| | | PAGSPTSTEEGTSESATPESGPGTSTEPSEGSAPGTSTEPSEGSAPGSP |
| | | AGSPTSTEEGTSTEPSEGSAPGTATESPEGSAPGTSESATPESGPGTST |
| | | EPSEGSAPGTSAESATPESGPGSEPATSGSETPGTSTEPSEGSAPGTST |
| | | EPSEGSAPGTSESATPESGPGTESAS |
| N-terminal | 224 | GSPAGSPTSTEEGTSESATPESGPGTSTEPSEGSAPGSPAGSPTSTEEG |
| XTEN | | TSTEPSEGSAPGTSTEPSEGSAPATSESATPESGPGSEPATSGSETPGS |
| | | EPATSGSETPGSPAGSPTSTEEGTSESASPESGPGTSTEPSEGSAPGTS |
| | | TEPSEGSAPGSPAGSPTSTEEGTSTEPSEGSAPGTSTEPSEGSAPGTSE |
| | | SATPESGPGTSTEPSEGSAPGTSESATPESGPGSEPATSGSETPGTSTE |
| | | PSEGSAPGTSTEPSEGSAPGTSESATPESGPGTSESATPESGPGSPAGS |
| | | PTSTEEGTSESATPESGPGSEPATSGSETPGTSESATPESGPGTSTEPS |
| | | EGSAPGTSTEPSEGSAPGTSTEPSEGSAPGTSTEPSEGSAPGTSTEPSE |
| | | GSAPGTSTEPSEGSAPGSPAGSPTSTEEGTSTEPSEGSAPGTSESATPE |
| | | SGPGSEPATSGSETPGTSESATPESGPGSEPATSGSETPGTSESATPES |
| | | GPGTSTEPSEGSAPGTSESATPESGPGSPAGSPTSTEEGSPAGSPTSTE |
| | | EGSPAGSPTSTEEGTSESATPESGPGTSTEPSEGSAPGTSESATPESGP |
| | | GSEPATSGSETPGTSESATPESGPGSEPATSGSETPGTSESATPESGPG |
| | | TSTEPSEGSAPGSPAGSPTSTEEGTSESATPESGPGSEPATSGSETPGT |
| | | SESATPESGPGSPAGSPTSTEEGSPAGSPTSTEEGTSTEPSEGSAPGTS |
| | | ESATPESGPGTSESATPESGPGTSESATPESGPGSEPATSGSETPGSEP |
| | | ATSGSETPGSPAGSPTSTEEGTSTEPSEGSAPGTSTEPSEGSAPGSEPA |
| | | TSGSETPGTSESATPESGPGTSTEPSEGSAP |
| N-terminal | 225 | GSPAGSPTSTEEGTSESATPESGPGTSTEPSEGSAPGSPAGSPTSTEEG |
| XTEN | | TSTEPSEGSAPGTSTEPSEGSAPGTSESATPESGPGSESATSGSETPGS |
| | | EPATSGSETPGSPAGSPTSTEEGTSESATPESGPGTSTEPSEGSAPGTS |
| | | TEPSEGSAPGSPAGSPTSTEEGTSTEPSEGSAPGTSTEPSEGSAPGTSE |
| | | SATPESGPGTSTEPSEGSAPGTSESATPESGPGSEPATSGSETPGTSTE |
| | | PSEGSAPGTSTEPSEGSAPGTSESATPESGPGTSESATPESGPGSPAGS |
| | | PTSTEEGTSESATPESGPGSEPATSGSETPGTSESATPESGPGTSTEPS |
| | | EGSAPGTSTEPSEGSAPGTSTEPSEGSAPGTSTEPSEGSAPGTSTEPSE |
| | | GSAPGTSTEPSEGSAPGSPAGSPTSTEEGTSTEPSEGSAPGTSESATPE |
| | | SGPGSEPATSGSETPGTSESATPESGPGSEPATSGSETPGTSESATPES |
| | | GPGTSTEPSEGSAPGTSESATPESGPGSPAGSPTSTEEGSPAGSPTSTE |
| | | EGSPAGSPTSTEEGTSESATPESGPGTSTEPSEGSAPGTSESATPESGP |
| | | GSEPATSGSETPGTSESATPESGPGSEPATSGSETPGTSESATPESGPG |
| | | TSTEPSEGSAPGSPAGSPTSTEEGTSESATPESGPGSEPATSGSETPGT |
| | | SESATPESGPGSPAGSPTSTEEGSPAGSPTSTEEGTSTEPSEGSAPGTS |
| | | ESATPESGPGTSESATPESGPGTSESATPESGPGSEPATSGSETPGSEP |
| | | ATSGSETPGSPAGSPTSTEEGTSTEPSEGSAPGTSTEPSEGSAPGSEPA |
| | | TSGSETPGTSESATPESGPGTSTEPSEGSAP |
| N-terminal | 226 | SPAGSPTSTESGTSESATPESGPGTSTEPSEGSAPGTSESATPESGPGS |
| XTEN (with | | EPATSGSETPGTSESATPESGPGSTPAESGSETPGTSESATPESGPGTS |
| His-tag) | | TEPSEGSAPGSPAGSPTSTEEGTSESATPESGPGSEPATSGSETPGTSE |
| | | SATPESGPGSPAGSPTSTEEGSPAGSPTSTEEGTSTEPSEGSAPGTSES |
| | | ATPESGPGTSESATPESGPGTSESATPESGPGSEPATSGSETPGSEPAT |
| | | SGSETPGSPAGSPTSTEEGTSTEPSEGSAPGTSTEPSEGSAPGGSAP |
| C-terminal | 227 | PGSPAGSPTSTEEGTSESATPESGPGSEPATSGSETPGTSESATPESGP |
| XTEN | | GTSTEPSEGSAPGTSTEPSEGSAPGTSTEPSEGSAPGTSTEPSEGSAPG |
| | | TSTEPSEGSAPGTSTEPSEGSAPGSPAGSPTSTEEGTSTEPSEGSAPGT |
| | | SESATPESGPGSEPATSGSETPGTSESATPESGPGSEPATSGSETPGTS |
| | | ESATPESGPGTSTEPSEGSAPGTSESATPESGPGSPAGSPTSTEEGSPA |
| | | GSPTSTEEGSPAGSPTSTEEGTSESATPESGPGTSTEPSEGSAPGTSES |
| | | ATPESGPGSEPATSGSETPGTSESATPESGPGSEPATSGSETPGTSESA |
| | | TPESGPGTSTEPSEGSAPGSPAGSPTSTEEGTSESATPESGPGSEPATS |
| | | GSETPGTSESATPESGPGSPAGSPTSTEEGSPAGSPTSTEEGTSTEPSE |
| | | GSAPGTSESATPESGPGTSESATPESGPGTSESATPESGPGSEPATSGS |
| | | ETPGSEPATSGSETPGSPAGSPTSTEEGTSTEPSEGSAPGTESTPSEGS |
| | | APGSEPATSGSETPGTSESATPESGPGTSTEPSEGSAPGEPEA |
| C-terminal | 228 | TPESGPGTSESATPESGPGSPAGSPTSTEEGTSESATPESGPGSEPATS |
| XTEN | | GSETPGTSESATPESGPGTSTEPSEGSAPGTSTEPSEGSAPGTSTEPSE |
| | | GSAPGTSTEPSEGSAPGTSTEPSEGSAPGTSTEPSEGSAPGSPAGSPTS |
| | | TEEGTSTEPSEGSAPGTSESATPESGPGSEPATSGSETPGTSESATPES |
| | | GPGSEPATSGSETPGTSESATPESGPGTSTEPSEGSAPGTSESATPESG |
| | | PGSPAGSPTSTEEGSPAGSPTSTEEGSPAGSPTSTEEGTSESATPESGP |
| | | GTSTEPSEGSAPGTSESATPESGPGSEPATSGSETPGTSESATPESGPG |
| | | SEPATSGSETPGTSESATPESGPGTSTEPSEGSAPGSPAGSPTSTEEGT |
| | | SESATPESGPGSEPATSGSETPGTSESATPESGPGSPAGSPTSTEEGSP |
| | | AGSPTSTEEGTSTEPSEGSAPGTSESATPESGPGTSESATPESGPGTSE |
| | | SATPESGPGSEPATSGSETPGSESATSGSETPGSPAGSPTSTEEGTSTE |
| | | PSEGSAPGTSTEPSEGSAPGSEPATSGSETPGTSESA |
| C-terminal | 229 | GTSTEPSEGSAPGTSESATPESGPGSEPATSGSETPGSEPATSGSETPG |
| XTEN | | SPAGSPTSTEEGTSESATPESGPGTSTEPSEGSAPGTSTEPSEGSAPGS |
| | | PAGSPTSTEEGTSTEPSEGSAPGTSTEPSEGSAPGTSESATPESGPGTS |
| | | TEPSEGSAPGTSESATPESGPGSEPATSGSETPGTSTEPSEGSAPGTST |
| | | EPSEGSAPGTSESATPESGPGTSESATPESGPGSPAGSPTSTEEGTSES |
| | | ATPESGPGSEPATSGSETPGTSESATPESGPGTSTEPSEGSAPGTSTEP |
| | | SEGSAPGTSTEPSEGSAPGTSTEPSEGSAPGTSTEPSEGSAPGTSTEPS |
| | | EGSAPGSPAGSPTSTEEGTSTEPSEGSAPGTSESATPESGPGSEPATS |
| | | GSETPGTSESATPESGPGSEPATSGSETPGTSESATPESGPGTSTEPSE |
| | | GSAPGTSESASPESGPGSPAGSPTSTEEGSPAGSPTSTEEGSPAGSPTS |
| | | TEEGTSESATPESGPGTSTEPSEGSAPGTSESATPESGPGSEPATSGSE |
| | | TPGTSESATPESGPGSEPATSGSETPGTSESATPESGP |
| C-terminal | 230 | GSETPGSPAGSPTSTEEGTSESATPESGPGTSTEPSEGSAPGTSTEPSE |
| XTEN | | GSAPGSPAGSPTSTEEGTSTEPSEGSAPGTSTEPSEGSAPGTSESATPE |
| | | SGPGTSTEPSEGSAPGTSESATPESGPGSEPATSGSETPGTSTEPSEGS |
| | | APGTSTEPSEGSAPGTSESATPESGPGTSESATPESGPGSPAGSPTSTE |
| | | EGTSESATPESGPGSEPATSGSETPGTSESATPESGPGTSTEPSEGSAP |
| | | GTSTEPSEGSAPGTSTEPSEGSAPGTSTEPSEGSAPGTSTEPSEGSAPG |
| | | TSTEPSEGSAPGSPAGSPTSTEEGTSTEPSEGSAPGTSESATPESGPGS |
| | | EPATSGSETPGTSESATPESGPGSEPATSGSETPGTSESATPESGPGTS |
| | | TEPSEGSAPGTSESATPESGPGSPAGSPTSTEEGSPAGSPTSTEEGSPA |
| | | GSPTSTEEGTSESATPESGPGTSTEPSEGSAPGTSESATPESGPGSEPA |
| | | TSGSTETGTSESATPESGPGSEPATSGSETPGTSESATPESGPGTSTEP |
| | | SEGSAPGSPAGSPTSTEEGTSESATPESGPGSEPATS |
| C-terminal | 231 | EGSAPGTSTEPSEGSAPGTSESATPESGPGTSTEPSEGSAPGTSESATP |
| XTEN | | ESGPGSEPATSGSETPGTSTEPSEGSAPGTSTEPSEGSAPGTSESATPE |
| | | SGPGTSESATPESGPGSPAGSPTSTEEGTSESATPESGPGSEPATSGSE |
| | | TPGTSESATPESGPGTSTEPSEGSAPGTSTEPSEGSAPGTSTEPSEGSA |
| | | PGTSTEPSEGSAPGTSTEPSEGSAPGTSTEPSEGSAPGSPAGSPTSTEE |
| | | GTSTEPSEGSAPGTSESATPESGPGSEPATSGSETPGTSESATPESGPG |
| | | SEPATSGSETPGTSESATPESGPGTSTEPSEGSAPGTSESATPESGPGS |
| | | PAGSPTSTEEGSPAGSPTSTEEGSPAGSPTSTEEGTSESATPESGPGTS |
| | | TEPSEGSAPGTSESATPESGPGSEPATSGSETPGTSESATPESGPGSEP |
| | | ATSGSETPGTSESASPESGPGTSTEPSEGSAPGSPAGSPTSTEEGTSES |
| | | ATPESGPGSEPATSGSETPGTSESATPESGPGSPAGSPTSTEEGSPAGS |
| | | PTSTEEGTSTEPSEGSAPGTSESATPESGPGTSESAT |
| N-terminal | 232 | ASSPAGSPTSTESGTSESATPESGPGTSTEPSEGSAPGTSESATPESGP |
| | | GSEPATSGSETPGTSESATPESGPGSTPAESGSETPGTSESATPESGPG |
| | | TSTEPSEGSAPGSPAGSPTSTEEGTSESATPESGPGSEPATSGSETPGT |
| | | SESATPESGPGSPAGSPTSTEEGSPAGSPTSTEEGTSTEPSEGSAPGTS |
| | | ESATPESGPGTSESATPESGPGTSESATPESGPGSEPATSGSETPGSEP |
| | | ATSGSETPGSPAGSPTSTEEGTSTEPSEGSAPGTSTEPSEGSAPGGSAP |

[0192] Additional examples of XTEN sequences that can be used according to the present disclosure are disclosed in U.S. Patent Publication Nos. 2010/0239554 A1, 2010/0323956 A1, 2011/0046060 A1, 2011/0046061 A1, 2011/0077199 A1, 2011/0172146 A1, 2018/0244736 A1, 2018/0346952 A1, and 2019/0153115 A1; U.S. Pat. Nos. 8,673,860, 9,371,369, 9,926,351, 9,249,211, and 9,976,166; and International Patent Publication Nos. WO 2010/091122 A1, WO 2010/144502 A2, WO 2010/144508 A1, WO 2011/028228 A1, WO 2011/028229 A1, WO 2011/028344 A2, WO 2014/011819 A2, WO 2015/023891, WO 2016/077505 A2, WO 2017/040344 A2, and WO 2019/126576 A1.

[0193] In general, XTEN are polypeptides with non-naturally occurring, substantially non-repetitive sequences having a low degree or no secondary or tertiary structure under physiologic conditions, as well as additional properties described in the paragraphs that follow. XTEN can have at least (about) 100, at least (about) 150, at least (about) 200, at least (about) 300, at least (about) 400, at least (about) 500, at least (about) 600, at least (about) 700, at least (about) 800, at least (about) 900, at least (about) 1,000 amino acids, or a range between any of the foregoing. As used herein, XTEN specifically excludes whole antibodies or antibody fragments (e.g. single-chain antibodies and Fc fragments). XTEN polypeptides have utility as fusion partners in that they serve in various roles, conferring certain desirable properties when linked to a composition comprising, for example, one or more biologically active moieties (such as one described herein). The resulting compositions have enhanced properties, such as enhanced pharmacokinetic, physicochemical, pharmacologic, and improved toxicological and pharmaceutical properties compared to the corresponding one or more biologically active moieties not linked to XTEN, making them useful in the treatment of certain conditions for which the one or more biologically active moieties are known in the art to be used.

[0194] The unstructured characteristic and physicochemical properties of the XTEN result, in part, from the overall amino acid composition that is disproportionately limited to 4-6 types of hydrophilic amino acids, the sequence of the amino acids in a quantifiable, substantially non-repetitive design, and from the resulting length of the XTEN polypeptide. In an advantageous feature common to XTEN but uncommon to native polypeptides, the properties of XTEN disclosed herein may not be tied to an absolute primary amino acid sequence, as evidenced by the diversity of the exemplary sequences of Tables 2b-2c that, within varying ranges of length, possess similar properties and confer enhanced properties on the compositions to which they are linked, many of which are documented in the Examples. Indeed, it is specifically contemplated that the compositions of the disclosure not be limited to those XTEN specifically enumerated in Tables 8 or 10, but, rather, the embodiments at least include sequences having at least 90%, 91%, 92%, 93%, 94%, 95%, 96%, 97%, 98%, or 99% sequence identity, when optimally aligned, to the sequences of Tables 2b-2c as they exhibit the properties of XTEN described herein. It has been established that such XTEN have properties more like non-proteinaceous, hydrophilic polymers (such as polyethylene glycol, or “PEG”) than they do proteins. The XTEN of the present disclosure exhibit one or more of the following advantageous properties: defined and uniform length (for a given sequence), conformational flexibility, reduced or lack of secondary structure, high degree of random coil formation, high degree of aqueous solubility, high degree of protease resistance, low immunogenicity, low binding to mammalian receptors, a defined degree of charge, and increased hydrodynamic (or Stokes) radii; properties that are similar to certain hydrophilic polymers (e.g., polyethylene glycol) that make them particularly useful as fusion partners.

[0195] XTEN, as described herein, are designed to behave like denatured peptide sequences under physiological conditions, despite the extended length of the polymer. “Denatured” describes the state of a peptide in solution that is characterized by a large conformational freedom of the peptide backbone. Most peptides and proteins adopt a denatured conformation in the presence of high concentrations of denaturants or at elevated temperature. Peptides in denatured conformation have, for example, characteristic circular dichroism (CD) spectra and are characterized by a lack of long-range interactions as determined by NMR. “Denatured conformation” and “unstructured conformation” are used synonymously herein. In some embodiments, the disclosure provides compositions that comprise XTEN sequences that, under physiologic conditions, resemble denatured sequences that are substantially devoid of secondary structure under physiologic conditions. “Substantially devoid,” as used in this context, means that at least about 80%, or about 90%, or about 95%, or about 97%, or at least about 99% of the XTEN amino acid residues of the XTEN sequence do not contribute to secondary structure, as measured or determined by the methods described herein, including algorithms or spectrophotometric assays.

[0196] A variety of well-established methods and assays are known in the art for determining and confirming the physicochemical properties of the subject XTEN and the subject polypeptide compositions into which they are incorporated. Such properties include but are not limited to secondary or tertiary structure, solubility, protein aggregation, stability, absolute and apparent molecular weight, purity and uniformity, melting properties, contamination and water content. The methods to measure such properties include analytical centrifugation, EPR, HPLC-ion exchange, HPLC-size exclusion chromatography (SEC), HPLC-reverse phase, light scattering, capillary electrophoresis, circular dichroism, differential scanning calorimetry, fluorescence, HPLC-ion exchange, HPLC-size exclusion, IR, NMR, Raman spectroscopy, refractometry, and UV/Visible spectroscopy. In particular, secondary structure can be measured spectrophotometrically, e.g., by circular dichroism spectroscopy in the “far-UV” spectral region (190-250 nm). Secondary structure elements, such as alpha-helix and beta-sheet, each give rise to a characteristic shape and magnitude of CD spectra, as does the lack of these structure elements. Secondary structure can also be predicted for a polypeptide sequence via certain computer programs or algorithms, such as the well-known Chou-Fasman algorithm (Chou, P. Y., et al. (1974) Biochemistry, 13: 222-45) and the Garnier-Osguthorpe-Robson algorithm (“GOR IV algorithm”) (Gamier J, Gibrat J F, Robson B. (1996), GOR method for predicting protein secondary structure from amino acid sequence. Methods Enzymol 266:540-553), as described in US Patent Application Publication No. 20030228309A1. For a given sequence, the algorithms can predict whether there exists some or no secondary structure at all, expressed as the total and/or percentage of residues of the sequence that form, for example, alpha-helices or beta-sheets or the percentage of residues of the sequence predicted to result in random coil formation (which lacks secondary structure). Polypeptide sequences can be analyzed using the Chou-Fasman algorithm using sites on the world wide web at, for example, fasta.bioch.virginia.edu/fasta_www2/fasta_www.cgi?rm=misc1 and the GOR IV algorithm at npsa-pbil.ibcp.fr/cgi-bin/npsa_automat.pl?page=npsa_gor4.html (both accessed on Dec. 8, 2017). Random coil can be determined by a variety of methods, including by using intrinsic viscosity measurements, which scale with chain length in a conformation-dependent way (Tanford, C., Kawahara, K. & Lapanje, S. (1966) J. Biol. Chem. 241, 1921-1923), as well as by size-exclusion chromatography (Squire, P. G., Calculation of hydrodynamic parameters of random coil polymers from size exclusion chromatography and comparison with parameters by conventional methods. Journal of Chromatography, 1981, 5,433-442). Additional methods are disclosed in Arnau, et al., Prot Expr and Purif (2006) 48, 1-13.

[0197] In some embodiments of the present disclosure, the activatable therapeutic agent is an activatable antibody (AA) composition, where the masking moiety (MM) refers to an amino acid sequence coupled to an antibody or antibody fragment (AB) and positioned such that it reduces the ability of the AB to bind its designated binding target by specifically binding to the antigen-binding domain of the AB (such as the complementarity-determining region(s) (CDR(s)). Such binding can be non-covalent. In some embodiments, the activatable antibody composition can be prevented from binding to the designated binding target by binding the MM to an N- or C-terminus of the activatable antibody composition.

[0198] Alternatively, the MM may not specifically bind the AB, but rather interfere with AB-target binding through non-specific interactions such as steric hindrance. For example, the MM may be positioned in the uncleaved activatable antibody composition such that the tertiary or quaternary structure of the activatable antibody allows the MM to mask the AB through charge-based interaction, thereby holding the MM in place to interfere with target access to the AB. The masking moiety (MM) can interfere or/and inhibit binding of the antibody or antibody fragment (AB) to the target allosterically or sterically.

[0199] When the antibody or antibody fragment (AB) is modified with a MM and is in the presence of the target, specific binding of the AB to its target can be reduced or inhibited, as compared to the specific binding of the AB, not modified with an MM, to the target. A dissociation constant (K_{d}) of the AB modified with a MM towards the AB's target can be generally greater than a corresponding K_{d} of the AB, not modified with a MM, towards the target. Conversely, a binding affinity of the AB modified with a MM towards the target can be generally lower than a binding affinity of the AB, not modified with a MM, towards the target. In some embodiments, the masking moiety (MM) of the activatable antibody composition can have an equilibrium dissociation constant (K_{d}) for binding to the antibody or a fragment thereof which is greater than the equilibrium dissociation of the antibody or the fragment thereof for binding to its designated binding target (near or at a diseased site in a subject).

[0200] When the antibody or antibody fragment (AB) is modified with a release segment (RS) and a masking moiety (MM) and is in the presence of the target but not sufficient protease or protease activity to cleave the RS, specific binding of the modified AB to the target can be generally reduced or inhibited, as compared to the specific binding of the AB modified with a RS and a MM in the presence of the target and sufficient protease or protease activity to cleave the RS. For example, when the modified antibody is an activatable antibody composition and comprises a release segment (RS), the AB can be unmasked upon cleavage of the RS, in the presence of protease, preferably a disease-specific protease. Thus, the MM is one that when the activatable antibody composition is uncleaved provides for masking of the AB from target binding, but does not substantially or significantly interfere or compete for binding of the target to the AB when the activatable antibody composition is in the cleaved conformation. A schematic of an exemplary activatable antibody (AA) composition is provided in FIG. 3. As illustrated, the release segment (RS) is positioned such that in a cleaved (or relatively active state) and in the presence of a target, the antibody or antibody fragment (AB) binds a target, while in an uncleaved (or relatively inactive state) in the presence of the target, specific binding of the AB to its target is reduced or inhibited. The specific binding of the antibody or antibody fragment (AB) to its target can be reduced due to the due to the inhibition or masking of the AB's ability to specifically bind its target by the masking moiety (MM).

[0201] In some embodiments of the activatable antibody compositions, where an antibody or antibody fragment (AB) is capable of specifically binding its designated binding target, a coupling of the masking moiety (MM) to the antibody or antibody fragment (AB) can reduce the ability of the AB to bind its designated binding target as compared to the ability of the AB not coupled to the MM to bind the designated binding target (for example, when assayed in vitro using a target displacement assay). Such coupling of the MM to the AB can reduce the ability of the AB to bind its designated binding target for a duration.

[0202] The masking moiety (MM) can be provided in a variety of different forms. In certain embodiments, the MM can be selected to be a known binding partner of the antibody or antibody fragment (AB), provided that the MM binds the AB with less affinity and/or avidity than the target protein to which the AB is designed to bind following cleavage of the release segment (RS) so as to reduce interference of MM in target-AB binding Stated differently, as discussed above, the MM is one that masks the AB from target binding when the activatable antibody composition is uncleaved, but does not substantially or significantly interfere or compete for binding for target when the activatable antibody composition is in the cleaved conformation. In a specific embodiment, the AB and MM do not contain the amino acid sequences of a naturally-occurring binding partner pair, such that at least one of the AB and MM does not have the amino acid sequence of a member of a naturally occurring binding partner. The masking moiety (MM) may not comprise more than 50% amino acid sequence identity to a natural binding partner of the antibody or antibody fragment (AB). The masking moiety (MM) can comprise a consensus sequence specific for binding to a class of antibodies against a designated binding target (e.g., diseased target). The MM can be a polypeptide of no more than 40 (e.g., from 2 to 40) amino acids in length. The MM can be coupled to the activatable antibody composition by covalent binding.

[0203] In some embodiments, the present disclosure provides for an activatable antibody complex (AAC) composition (as illustrated in FIG. 4) comprising: (1) two antibodies or antibody fragments (AB1 and AB2), each capable of specifically binding its designated binding target, (2) at least one masking moiety (MM) coupled to either AB1 or AB2, capable of inhibiting the specific binding of AB1 and AB2 to their designated binding target(s), and (3) at least one release segment (RS) coupled to either AB1 or AB2, capable of being specifically cleaved by a protease whereby activating the AAC composition. In some embodiments, when the AAC is in an uncleaved state, the MM can inhibit the specific binding of AB1 and AB2 to their designated binding target(s) and when the AAC is in a cleaved state, the MM does not inhibit the specific binding of AB1 and AB2 to their designated binding targets. The two ABs can bind different targets, or different epitopes on the same target.

[0204] In some embodiments, the MM does not inhibit cellular entry of the activatable antibody composition.

[0205] In some embodiments, the masking moiety (MM) can comprise an anti-albumin domain, such as a single domain antibody (sdAb) anti-albumin domain. In some embodiments, the anti-albumin domain can comprise non-CDR loops, CDR loops, or any combination thereof. In some embodiments, the anti-albumin domain can comprise both non-CDR loops and CDR loops. The non-CDR loops can be capable of binding to one or more antibody or antibody fragment (AB) (for example, and not limited to, the CDRs of the AB) of an activatable antibody (AA) composition, thereby masking the AB (at least in some cases) by inhibiting or reducing the ability of the AB to bind to its designated target(s). The CDR loops can be capable of binding albumin (e.g., human serum albumin), thereby (at least in some cases) masking the AB in the activatable antibody (AA) composition from binding to its designated target(s) via steric or allosteric hindrance and/or conferring half-life extension for the AA composition. In some embodiments, the non-CDR loops can be engineered into different position of the anti-albumin sdAb domain. In some embodiments, the MM can (1) inhibit or reduce the ability of the AB to bind to its designated target(s) via (1a) specific binding to the target recognition region of the AB and/or (1b) steric masking of target recognition region of the AB, and/or the MM can (2) confer half-life extension for the AA containing the AB via binding to albumin. The MM can be coupled (directly or indirectly) to the activatable antibody composition by covalent binding.

[0206] As illustrated in the schematic shown in FIG. 5, an exemplary activatable antibody complex (AAC) composition can comprise: (1) at least two antibodies or antibody fragments (AB1 and AB2), each capable of specifically binding their designated binding target(s), (2) at least one masking moiety (MM) coupled to AB1 or AB2, capable of inhibiting the specific binding of AB1 or AB2 to their designated binding target(s), and (3) at least one release segment (RS) coupled to AB1 or AB2, capable of being specifically cleaved by a protease whereby activating the activatable antibody complex (AAC) composition. In some embodiments, when the AA is in an uncleaved state, the MM can inhibit the specific binding of AB1 or AB2 to their designated binding target(s), and when the activatable antibody complex (AAC) composition is in a cleaved state, the MM does not inhibit the specific binding of AB1 or AB2 to their designated binding target(s). In some embodiments, the masking moiety (MM) can be coupled to both AB1 and AB2 via two separate release segments (RS). In other words, the MM can be placed between AB1 and AB2, coupled either to the C end of AB1 and the N end of AB2, or coupled to the N end of AB1 and the C end of AB2.

[0207] In some embodiments of the present disclosure, the activatable therapeutic agent is an activatable antibody (AA) composition, where the masking moiety (MM) refers to an amino acid sequence coupled to an antibody or antibody fragment (AB) (for example, but not limited to, an scFv, an sdAb, or a fragment thereof) and positioned such that it reduces the ability of the AB to dimerize with another antibody or antibody fragment, preventing the formation of an antibody or an antibody fragment capable of binding to target. Such binding can be non-covalent. In some embodiments, the activatable antibody composition can be prevented from binding to the designated binding target by binding the MM to an N- or C-terminus of the activatable antibody composition.

[0208] When the antibody or antibody fragment (AB) is modified with a MM and is in the presence of the target, specific binding of the AB to its dimerization partner can be reduced or inhibited, as compared to the specific binding of the AB, not modified with an MM, to its dimerization partner. A dissociation constant (K_{d}) of the AB modified with a MM towards its dimerization partner can be generally greater than a corresponding K_{d} of the AB, not modified with a MM, towards its dimerization partner. Conversely, a binding affinity of the AB modified with a MM towards its dimerization partner can be generally lower than a binding affinity of the AB, not modified with a MM, towards its dimerization partner. In some embodiments, the masking moiety (MM) of the activatable antibody composition can have an equilibrium dissociation constant (K_{d}) for binding to the antibody or a fragment thereof which is greater than the equilibrium dissociation of the antibody or the fragment thereof for binding to its designated dimerization partner.

[0209] When the antibody or antibody fragment (AB) is modified with a release segment (RS) and a masking moiety (MM) and is in the presence of the target but not sufficient protease or protease activity to cleave the RS, specific ability of the modified AB to dimerize with another antibody or antibody fragment and the resulting ability of the dimer to bind to its designated binding target(s) can be generally reduced or inhibited, as compared to the specific dimerization ability of the AB modified with a RS and a MM and the subsequent ability of the dimer to bind to its designated binding target(s) in the presence of the target and sufficient protease or protease activity to cleave the RS. For example, when the modified antibody is an activatable antibody composition and comprises a release segment (RS), the AB can be unmasked upon cleavage of the RS, in the presence of protease, preferably a disease-specific protease. Thus, the MM is one that when the activatable antibody composition is uncleaved provides for masking of the AB from dimerization with another AB and for reduction or inhibition of binding of the resulting dimer to its designated binding target(s), but does not substantially or significantly interfere or compete for dimerization to another AB and for reduction or inhibition of binding of the resulting dimer to its designated binding target(s) when the activatable antibody composition is in the cleaved conformation.

[0210] The masking moiety can be provided in different forms. In some embodiments, the masking domain can be an inhibitory antibody or antibody fragment (IAB; for example, but not limited to, a VL or VH domain), provided that the MM binds the AB with less affinity and/or avidity than the dimerization partner with which AB is designed to dimerize following cleavage of the release segment (RS) so as to reduce interference of MM in AB-AB dimerization. Stated differently, as discussed above, the MM is one that masks the AB from dimerization to another AB when the activatable antibody composition is uncleaved, but does not substantially or significantly interfere or compete for dimerization with another AB when the activatable antibody composition is in the cleaved conformation. The MM can be coupled to the activatable antibody composition by covalent binding.

[0211] In some embodiments, the present disclosure provides for an activatable antibody complex (AAC) composition (as illustrated in FIG. 6) comprising: (1) two antibodies or antibody fragments (AB1 and AB2) (2) two masking moieties (MM) coupled to one each to AB1 and AB2, capable of reducing or inhibiting the specific dimerization of AB1 and AB2 and subsequent binding of AB1-AB2 complex to their designated binding target(s), (3) at least three release segments (RS) coupled to AB1, AB2 and MMs capable of being specifically cleaved by a protease whereby activating the AAC composition, (4) at least one additional antibody or antibody fragment (AB3 and/or AB4; for example, but not limited to, an scFv or an sdAb), coupled to AB1 and/or AB2. In some embodiments, when the AAC is in an uncleaved state, the MM can inhibit or reduce the specific dimerization of AB1 and AB2 and subsequently inhibit or reduce the binding of the resulting AB1-AB2 dimer to its designated binding target(s) and when the AAC is in a cleaved state, the MM does not reduce or inhibit the specific dimerization of AB1 and AB2 and does not reduce or inhibit the subsequent binding of the AB1-AB2 dimer to its designated binding target(s). When more than one additional AB is coupled to AB1 and/or AB2, the additional ABs can bind the same target or different targets.

[0212] In some embodiments, the MM can comprise a coiled-coil domain, for example, but not limited to, (1) high affinity parallel heterodimeric leucine zipper coiled-coil domain, containing or devoid of cysteines, (2) low affinity parallel heterodimeric coiled-coil leucine zipper domain, containing or devoid of cysteines, (3) disulfide-linked covalent coiled-coil domain, (4) antiparallel heterodimeric leucine zipper coiled-coil domain, (5) helix-turn-helix homodimeric leucine zipper coiled coil domain. The MM can be coupled (directly or indirectly) to the activatable antibody composition by covalent binding. In some embodiments, the MM can reduce or inhibit the binding of AB to its intended target(s) via steric or allosteric hindrance.

[0213] In some embodiments, the present disclosure provides for an activatable antibody complex (AAC) composition (as illustrated in FIG. 7) comprising: (1) at least one antibody or antibody fragment (AB), (2) at least one masking moiety (MM) coupled to AB, capable of inhibiting the specific binding of AB to its designated binding target, and (3) at least one release segment (RS) coupled to AB, capable of being specifically cleaved by a protease whereby activating the AAC composition. In some embodiments, when the AAC is in an uncleaved state, the MM can reduce or inhibit the specific binding of AB to its designated binding target(s) and when the AAC is in a cleaved state, the MM does not reduce or inhibit the specific binding of AB to its designated binding target(s).

[0214] In some embodiments, the activatable therapeutic agent may incorporate a cleavage sequence as described herein, and/or be administered to a patient who is identified as being a likely responder to the therapeutic agent based on the identification of a peptide biomarker in a biological sample from the subject (as described further herein).

### Biologically Active Moieties (BM)

[0215] In some embodiments of the therapeutic agent (or the activatable therapeutic agent, or the non-natural, activatable therapeutic agent), the biologically active moiety (BM) can comprise a biologically active peptide (BP). The biologically active peptide (BP) can comprise an antibody, a cytokine, a cell receptor, or a fragment thereof. The biologically active polypeptide (BP) can comprise a binding moiety having a binding affinity for a target cell marker on a target tissue or cell. The target cell marker can be an effector cell antigen expressed on a surface of an effector cell. The binding moiety can be an antibody. The antibody can be selected from the group consisting of Fv, Fab, Fab′, Fab′-SH, nanobody (also known as single domain antibody or V_{HH}), linear antibody, and single-chain variable fragment (scFv).

[0216] In some embodiments of the therapeutic agent (or the activatable therapeutic agent, or the non-natural, activatable therapeutic agent), where the binding moiety can be a first binding moiety, and wherein the target cell marker can be a first target cell marker, the biologically active polypeptide (BP) can further comprise a second binding moiety linked, directly or indirectly to the first binding moiety. The second binding moiety can have a binding affinity for a second target cell marker on the target tissue or cell. The second target cell marker can be a marker on a tumor cell or a cancer cell. The second binding moiety can be an antibody. The second binding moiety can be an antibody selected from the group consisting of Fv, Fab, Fab′, Fab′-SH, nanobody (also known as single domain antibody or V_{HH}), linear antibody, and single-chain variable fragment (scFv).

[0217] In some embodiments as disclosed herein, a biologically active moiety (BM) or a biologically active peptide (BP) can exhibit a binding specificity to a given target (or a given number of targets) or/and another desired biological characteristic, when used in vivo or when utilized in an in vitro assay. For example, the BM or BP can be an agonist, a receptor, a ligand, an antagonist, an enzyme, an antibody (e.g., mono- or bi-specific), or a hormone. Of particular interest are BM or BP used, or known to be useful, for a disease or disorder where the native BM or BP have a relatively short terminal half-life and for which an enhancement of a pharmacokinetic parameter (which optionally could be released from a conjugate or a fusion polypeptide by cleavage of a spacer sequence) would permit less frequent dosing or an enhanced pharmacologic effect. Also of interest are BM or BP that have a relatively narrow therapeutic window between the minimum effective dose or blood concentration (Cₘᵢₙ) and the maximum tolerated dose or blood concentration (Cₘₐₓ). In such cases, the linking of the BM or BP within a conjugate or a fusion polypeptide comprising a select masking moiety, such as XTEN, can result in an improvement in these properties, making them more useful as therapeutic or preventive agents compared to the BM or BP not linked to a masking moiety, such as XTEN. The BM or BP encompassed by the inventive compositions described herein can have utility in the treatment in various therapeutic or disease categories, including but not limited to glucose and insulin disorders, metabolic disorders, cardiovascular diseases, coagulation and bleeding disorders, growth disorders or conditions, endocrine disorders, eye diseases, kidney diseases, liver diseases, tumorigenic conditions, inflammatory conditions, autoimmune conditions, etc.

[0218] In some embodiments of the compositions disclosed herein, where the biologically active moiety is a biologically active peptide (BP), the BP can comprise a peptide sequence that exhibits at least (about) 80% sequence identity (e.g., at least (about) 81%, at least (about) 82%, at least (about) 83%, at least (about) 84%, at least (about) 85%, at least (about) 86%, at least (about) 87%, at least (about) 88%, at least (about) 89%, at least (about) 90%, at least (about) 91%, at least (about) 92%, at least (about) 93%, at least (about) 94%, at least (about) 95%, at least (about) 96%, at least (about) 97%, at least (about) 98%, at least (about) 99%, or 100% sequence identity to an amino acid sequence of a glucose regulating peptide or a glucagon-like peptide (native or synthetic analog) set forth in Tables 3a-3c (such as one described more fully hereinbelow in the GLUCOSE REGULATING PEPTIDES section), or to an amino acid sequence of a protein relating to metabolic disorders and cardiology set forth in Table 3d (such as one described more fully hereinbelow in the METABOLIC DISEASE AND CARDIOVASCULAR PROTEINS section), or to an amino acid sequence of a growth hormone set forth in Table 3f (such as one described more fully hereinbelow in the GROWTH HORMONE PROTEINS section), or to an amino acid sequence of a cytokine set forth in Table 3g (such as one described more fully hereinbelow in the CYTOKINES section), or to an amino acid sequence of a transduction domain in Table 3h (such as one described more fully hereinbelow). In some embodiments of the compositions of this disclosure, the sequence of the BP can comprise one or more substitutions shown in Table 4 (such as one described more fully hereinbelow).

[0219] In some embodiments of the compositions disclosed herein, where the biologically active moiety is a biologically active peptide (BP), the BP can comprise an antibody (e.g., a monospecific, bispecific, trispecific, or multispecific antibody) (as defined hereinabove, the term “antibody” includes, among other things, an antibody fragment) (such as one described more fully hereinbelow in the ANTIBODIES section). The antibody can comprise a binding domain (or binding moiety) having binding affinity for an effector cell antigen. The effector cell antigen can be expressed on the surface of an effector cell selected from a plasma cell, a T cell, a B cell, a cytokine induced killer cell (CIK cell), a mast cell, a dendritic cell, a regulatory T cell (RegT cell), a helper T cell, a myeloid cell, and a NK cell. The effector cell antigen can be expressed on or within an effector cell. The effector cell antigen can be expressed on a T cell, such as a CD4+, CD8+, or natural killer (NK) cell. The effector cell antigen can be expressed on the surface of a T cell. The effector cell antigen can be expressed on a B cell, master cell, dendritic cell, or myeloid cell. The binding domain (or binding moiety) can comprise VH and VL regions derived from a monoclonal antibody capable of binding human CD3. In some embodiments, where the binding domain (or binding moiety) having binding affinity for CD3, the binding domain (or binding moiety) can have binding affinity for a member of the CD3 complex, which includes in individual form or independently combined form all known CD3 subunits of the CD3 complex; for example, CD3 epsilon, CD3 delta, CD3 gamma, CD3 zeta, CD3 alpha and CD3 beta. The binding domain (or binding moiety) having binding affinity for CD3 can have binding affinity for CD3 epsilon, CD3 delta, CD3 gamma, CD3 zeta, CD3 alpha or CD3 beta. In some embodiments of the compositions of this disclosure, the binding domain (or binding moiety) binding human CD3 can be derived from an anti-CD3 antibody selected from the group of antibodies set forth in Tables 5a-5e. The binding domain (or binding moiety) binding human CD3 can comprise VH and VL regions, where each VH and VL regions exhibit at least (about) 90%, or at least (about) 91%, or at least (about) 92%, or at least (about) 93%, or at least (about) 94%, or at least (about) 95%, or at least (about) 96%, or at least (about) 97%, or at least (about) 98%, or at least (about) 99%, or 100% sequence identity to paired VL and VH sequences of an anti-CD3 antibody selected from those set forth in Table 5a or Table 5d. The binding domain (or binding moiety) binding human CD3 can comprise VH and VL regions, where each VH and VL regions exhibit at least (about) 90%, or at least (about) 91%, or at least (about) 92%, or at least (about) 93%, or at least (about) 94%, or at least (about) 95%, or at least (about) 96%, or at least (about) 97%, or at least (about) 98%, or at least (about) 99%, or 100% sequence identity to paired VL and VH sequences of the huUCHT1 anti-CD3 antibody of Table 5a. The binding domain (or binding moiety) binding human CD3 can comprise a CDR-H1 region, a CDR-H2 region, a CDR-H3 region, a CDR-L1 region, a CDR-L2 region, and a CDR-H3 region, wherein each of the regions can be derived from a monoclonal antibody selected from the group of antibodies set forth in Tables 5a-5b or Table 5d. The binding domain (or binding moiety) binding human CD3 can comprise FRs each independently exhibiting at least (about) 90%, or at least (about) 91%, or at least (about) 92%, or at least (about) 93%, or at least (about) 94%, or at least (about) 95%, or at least (about) 96%, or at least (about) 97%, or at least (about) 98%, or at least (about) 99%, or 100% sequence identity to a corresponding FR set forth in Table 5c. The binding domain (or binding moiety) binding human CD3 can comprise a single-chain variable fragment (scFv) sequence exhibiting at least (about) 90%, or at least (about) 91%, or at least (about) 92%, or at least (about) 93%, or at least (about) 94%, or at least (about) 95%, or at least (about) 96%, or at least (about) 97%, or at least (about) 98%, or at least (about) 99%, or 100% sequence identity to an anti-CD3 scFv sequence set forth in Table 5e. In the foregoing embodiments, the VH and/or VL domains can be configured as scFv, diabodies, a single domain antibody, or a single domain camelid antibody. The antibody can comprise a binding domain (or binding moiety) having specific binding affinity to a tumor-specific marker or an antigen of a target cell (or a target antigen). The tumor-specific marker or the antigen of the target cell can be selected from the group consisting of alpha 4 integrin, Ang2, B7-H3, B7-H6 (e.g., its natural ligand Nkp30 rather than an antibody fragment), CEACAM5, cMET, CTLA4, FOLR1, EpCAM (epithelial cell adhesion molecule), CCR5, CD19, HER2, HER2 neu, HER3, HER4, HER1 (EGFR), PD-L1, PSMA, CEA, TROP-2, MUC1(mucin), MUC-2, MUC3, MUC4, MUC5AC, MUC5B, MUC7, MUC16, βhCG, Lewis-Y, CD20, CD33, CD38, CD30, CD56 (NCAM), CD133, ganglioside GD3, 9-O-acetyl-GD3, GM2, Globo H, fucosyl GM1, GD2, carbonicanhydrase IX, CD44v6, Nectin-4, Sonic Hedgehog (Shh), Wue-1, plasma cell antigen 1 (PC-1), melanoma chondroitin sulfate proteoglycan (MCSP), CCR8, 6-transmembrane epithelial antigen of prostate (STEAP), mesothelin, A33 antigen, prostate stem cell antigen (PSCA), Ly-6, desmoglein 4, fetal acetylcholine receptor (fnAChR), CD25, cancer antigen 19-9 (CA19-9), cancer antigen 125 (CA-125), Muellerian inhibitory substance receptor type II (MISIIR), sialylated Tn antigen (sTN), fibroblast activation antigen (FAP), endosialin (CD248), epidermal growth factor receptor variant III (EGFRvIII), tumor-associated antigen L6 (TAL6), SAS, CD63, TAG72, Thomsen-Friedenreich antigen (TF-antigen), insulin-like growth factor I receptor (IGF-IR), Cora antigen, CD7, CD22, CD70 (e.g., its natural ligand, CD27 rather than an antibody fragment), CD79a, CD79b, G250, MT-MMPs, fibroblast activation antigen (FAP), alpha-fetoprotein (AFP), VEGFR1, VEGFR2, DLK1, SP17, ROR1, EphA2, ENPP3, glypican 3 (GPC3), and TPBG/5T4 (trophoblast glycoprotein). The tumor-specific marker or the antigen of the target cell can be selected from alpha 4 integrin, Ang2, CEACAM5, cMET, CTLA4, FOLR1, EpCAM (epithelial cell adhesion molecule), CD19, HER2, HER2 neu, HER3, HER4, HER1 (EGFR), PD-L1, PSMA, CEA, TROP-2, MUC1(mucin), Lewis-Y, CD20, CD33, CD38, mesothelin, CD70 (e.g., its natural ligand, CD27 rather than an antibody fragment), VEGFR1, VEGFR2, ROR1, EphA2, ENPP3, glypican 3 (GPC3), and TPBG/5T4 (trophoblast glycoprotein). The tumor-specific marker or the antigen of the target cell can be any one set forth in the “Target” column of Table 6. The binding domain (or binding moiety) with binding affinity to the tumor-specific marker or the target cell antigen can comprise VH and VL regions wherein each VH and VL regions can exhibit at least (about) 90%, or at least (about) 91%, or at least (about) 92%, or at least (about) 93%, or at least (about) 94%, or at least (about) 95%, or at least (about) 96%, or at least (about) 97%, or at least (about) 98%, or at least (about) 99%, or 100%, sequence identity to any one of the paired VL and VH sequences set forth in the “VH Sequences” and “VL Sequences” columns of Table 6. Without limiting the scope, additional exemplary tumor antigen target(s) can be selected from the group consisting of: FGFR2, LIV1, TRK, RET, BCMA, CD71, CD166, SSTR2, cKIT, VISTA, GPNMB, DLL3, CD123, LAMP1, P-Cadherin, Ephrin-A4, PTK7, NaPi2b, GCC, C4.4a, Mucin 17, FLT3, NKG2D ligands, SLAMF7, IL13a2R, CLL-1/CLEC12A, CD66e, IL3Ra, CD5, ULBP1, B7H4, CSPG4, SDC1, IL1RAP, Survivin, CD138, CD74, TIM1, SLITRK6, CD37, CD142, AXL, ETBR, Cadherin 6, FGFR3, CA6, CanAg (novel glycophorm of Muc 1), Integrin alpha V, Cripto 1 (TDGF1), CD352, and NOTCH3.

[0220] The bioactivity of the BP embodiments described herein can be evaluated by using assays or measured/determined parameters as described herein, and those sequences that retain at least (about) 40%, or at least (about) 50%, or at least (about) 55%, or at least (about) 60%, or at least (about) 70%, or at least (about) 80%, or at least (about) 90%, or at least (about) 95% or more activity compared to the corresponding native BP sequence would be considered suitable for inclusion in the compositions of this disclosure.

### Glucose Regulating Peptides

[0221] Endocrine and obesity-related diseases or disorders have reached epidemic proportions in most developed nations, and represent a substantial and increasing health care burden in most developed nations, which include a large variety of conditions affecting the organs, tissues, and circulatory system of the body. Of particular concern are endocrine and obesity-related diseases and disorders, which. Chief amongst these is diabetes; one of the leading causes of death in the United States. Diabetes is divided into two major sub-classes-Type I, also known as juvenile diabetes, or Insulin-Dependent Diabetes Mellitus (IDDM), and Type II, also known as adult onset diabetes, or Non-Insulin-Dependent Diabetes Mellitus (NIDDM). Type I Diabetes is a form of autoimmune disease that completely or partially destroys the insulin producing cells of the pancreas in such subjects, and requires use of exogenous insulin during their lifetime. Even in well-managed subjects, episodic complications can occur, some of which are life-threatening.

[0222] In Type II diabetics, rising blood glucose levels after meals do not properly stimulate insulin production by the pancreas. Additionally, peripheral tissues are generally resistant to the effects of insulin, and such subjects often have higher than normal plasma insulin levels (hyperinsulinemia) as the body attempts to overcome its insulin resistance. In advanced disease states insulin secretion is also impaired.

[0223] Insulin resistance and hyperinsulinemia have also been linked with two other metabolic disorders that pose considerable health risks: impaired glucose tolerance and metabolic obesity. Impaired glucose tolerance is characterized by normal glucose levels before eating, with a tendency toward elevated levels (hyperglycemia) following a meal. These individuals are considered to be at higher risk for diabetes and coronary artery disease. Obesity is also a risk factor for the group of conditions called insulin resistance syndrome, or “Syndrome X,” as is hypertension, coronary artery disease (arteriosclerosis), and lactic acidosis, as well as related disease states. The pathogenesis of obesity is believed to be multifactorial but an underlying problem is that in the obese, nutrient availability and energy expenditure are not in balance until there is excess adipose tissue. Other related diseases or disorders include, but are not limited to, gestational diabetes, juvenile diabetes, obesity, excessive appetite, insufficient satiety, metabolic disorder, glucagonomas, retinal neurodegenerative processes, and the “honeymoon period” of Type I diabetes.

[0224] Dyslipidemia is a frequent occurrence among diabetics; typically characterized by elevated plasma triglycerides, low HDL (high density lipoprotein) cholesterol, normal to elevated levels of LDL (low density lipoprotein) cholesterol and increased levels of small dense, LDL particles in the blood. Dyslipidemia is a main contributor to an increased incidence of coronary events and deaths among diabetic subjects.

[0225] Most metabolic processes in glucose homeostatis and insulin response are regulated by multiple peptides and hormones, and many such peptides and hormones, as well as analogues thereof, have found utility in the treatment of metabolic diseases and disorders. Many of these peptides tend to be highly homologous to each other, even when they possess opposite biological functions. Glucose-increasing peptides are exemplified by the peptide hormone glucagon, while glucose-lowering peptides include exendin-4, glucagon-like peptide 1, and amylin. However, the use of therapeutic peptides and/or hormones, even when augmented by the use of small molecule drugs, has met with limited success in the management of such diseases and disorders. In particular, dose optimization is important for drugs and biologics used in the treatment of metabolic diseases, especially those with a narrow therapeutic window. Hormones in general, and peptides involved in glucose homeostasis often have a narrow therapeutic window. The narrow therapeutic window, coupled with the fact that such hormones and peptides typically have a short half-life, which necessitates frequent dosing in order to achieve clinical benefit, results in difficulties in the management of such patients. While chemical modifications to a therapeutic protein, such as pegylation, can modify its in vivo clearance rate and subsequent serum half-life, it requires additional manufacturing steps and results in a heterogeneous final product. In addition, unacceptable side effects from chronic administration have been reported. Alternatively, genetic modification by fusion of an Fc domain to the therapeutic protein or peptide increases the size of the therapeutic protein, reducing the rate of clearance through the kidney, and promotes recycling from lysosomes by the FcRn receptor. Unfortunately, the Fc domain does not fold efficiently during recombinant expression and tends to form insoluble precipitates known as inclusion bodies. These inclusion bodies must be solubilized and functional protein must be renatured; a time-consuming, inefficient, and expensive process.

[0226] In some embodiments of the compositions of this disclosure, the biologically active peptide (BP) can comprise peptides involved in glucose homoestasis, insulin resistance and obesity (collectively, “glucose regulating peptides”), which compositions have utility in the treatment of glucose, insulin, and obesity disorders, disease and related conditions. Glucose regulating peptides can include any protein of biologic, therapeutic, or prophylactic interest or function that is useful for preventing, treating, mediating, or ameliorating a disease, disorder or condition of glucose homeostasis or insulin resistance or obesity. Suitable glucose-regulating peptides that can be linked to a masking moiety (such as XTEN) can include all biologically active polypeptides that increase glucose-dependent secretion of insulin by pancreatic beta-cells or potentiate the action of insulin. Glucose-regulating peptides can also include all biologically active polypeptides that stimulate pro-insulin gene transcription in the pancreatic beta-cells. Furthermore, glucose-regulating peptides can also include all biologically active polypeptides that slow down gastric emptying time and reduce food intake. Glucose-regulating peptides can also include all biologically active polypeptides that inhibit glucagon release from the alpha cells of the Islets of Langerhans. Table 3a provides a non-limiting list of sequences of glucose regulating peptides that can be encompassed by the compositions of this disclosure. In some embodiments of the compositions disclosed herein, where the biologically active moiety can be a biologically active peptide (BP), the BP can comprise a peptide sequence that exhibits at least (about) 80% sequence identity (e.g., at least (about) 81%, at least (about) 82%, at least (about) 83%, at least (about) 84%, at least (about) 85%, at least (about) 86%, at least (about) 87%, at least (about) 88%, at least (about) 89%, at least (about) 90%, at least (about) 91%, at least (about) 92%, at least (about) 93%, at least (about) 94%, at least (about) 95%, at least (about) 96%, at least (about) 97%, at least (about) 98%, at least (about) 99%, or 100% sequence identity) to an amino acid sequence of a glucose regulating peptide set forth in Table 3a.

TABLE 3a
Glucose-Regulating Peptides

| Name of Protein | SEQ ID | |
|---|---|---|
| (Synonym) | NO: | Amino Acid Sequence |
| Adrenomedullin (ADM) | 233 | YRQSMNNFQGLRSFGCRFGTCTVQKLAHQIYQFTDKDKD |
| | | NVAPRSKISPQGY |
| Amylin, rat | 234 | KCNTATCATQRLANFLVRSSNNLGPVLPPTNVGSNTY |
| Amylin, human | 235 | [sequence omitted] |
| Calcitonin (hCT) | 236 | CGNLSTCMLGTYTQDFNKFHTFPQTAIGVGAP |
| Calcitonin, salmon | 237 | CSNLSTCVLGKLSQELHKLQTYPRTNTGSGTP |
| Calcitonin gene related peptide | 238 | ACDTATCVTHRLAGLLSRSGGVVKNMVPTNVGSKAF |
| (h-CGRP α) | | |
| Calcitonin gene related peptide | 239 | ACNTATCVTHRLAGLLSRSGGMVKSNFVPTNVGSKAF |
| (h-CGRP β) | | |
| cholecystokinin (CCK) | 240 | MNSGVCLCVLMAVLAAGALTQPVPPADPAGSGLQRAEE |
| | | APRRQLRVSQRTDGESRAHLGALLARYIQQARKAPSGRM |
| | | SIVKNLQNLDPSHRISDRDYMGWMDFGRRSAEEYEYPS |
| CCK-33 | 241 | KAPSGRMSIVKNLQNLDPSHRISDRDYMGWMDF |
| CCK-8 | 242 | DYMGWMDF |
| Exendin-3 | 243 | HSDGTFTSDLSKQMEEEAVRLFIEWLKNGGPSSGAPPPS |
| Exendin-4 | 244 | HGEGTFTSDLSKQMEEEAVR LFIEWLKNGGPSSGAPPPS |
| FGF-19 | 245 | MRSGCVVVHVWILAGLWLAVAGRPLAFSDAGPHVHYG |
| | | WGDPIRLRHLYTSGPHGLSSCFLRIRADGVVDCARGQSAH |
| | | SLLEIKAVALRTVAIKGVHSVRYLCMGADGKMQGLLQYS |
| | | EEDCAFEEEIRPDGYNVYRSEKHRLPVSLSSAKQRQLYKN |
| | | RGFLPLSHFLPMLPMVPEEPEDLRGHLESDMFSSPLETDSM |
| | | DPFGLVTGLEAVRSPSFEK |
| FGF-21 | 246 | MDSDETGFEHSGLWVSVLAGLLLGACQAHPIPDSSPLLQF |
| | | GGQVRQRYLYTDDAQQTEAHLEIREDGTVGGAADQSPES |
| | | LLQLKALKPGVIQILGVKTSRFLCQRPDGALYGSLHFDPEA |
| | | CSFRELLLEDGYNVYQSEAHGLPLHLPGNKSPHRDPAPRG |
| | | PARFLPLPGLPPALPEPPGILAPQPPDVGSSDPLSMVGPSQG |
| | | RSPSYAS |
| Gastrin | 247 | QLGPQGPPHLVADPSKKQGPWLEEEEEAYGWMDF |
| Gastrin-17 | 248 | DPSKKQGPWLEEEEEAYGWMDF |
| Gastric inhibitory polypeptide | 249 | YAEGTFISDYSIAMDKIHQQDFVNWLLAQKGKKNDWKH |
| (GIP) | | NITQ |
| Ghrelin | 250 | GSSFLSPEHQRVQQRKESKKPPAKLQPR |
| Glucagon | 251 | HSQGTFTSDYSKYLDSRRAQDFVQWLMNT |
| Glucagon-like peptide-1 | 252 | HDEFERHAEGTFTSDVSSTLEGQAALEFIAWLVKGRG |
| (hGLP-1) (GLP-1; 1-37) | | |
| GLP-1 (7-36), human | 253 | HAEGTFTSDVSSYLEGQAALEFIAWLVKGR |
| GLP-1 (7-37), human | 254 | HAEGTFTSDVSSTLEGQAALEFIAWLVKGRG |
| GLP-1, frog | 255 | HAEGTYTNDVTEYLEEKAAKEFIEWLIKGKPKKIRYS |
| Glucagon-like peptide 2 (GLP- | 256 | HADGSFSDEMNTILDNLAARDFINWLIETKITD |
| 2), human | | |
| GLP-2, frog | 257 | HAEGTFTNDMTNYLEEKAAKEFVGWLIKGRP-OH |
| IGF-1 | 258 | GPETLCGAELVDALQFVCGDRGFYFNKPTGYGSSSRRAPQ |
| | | TGIVDECCFRSCDLRRLEMYCAPLKPAKSA |
| IGF-2 | 259 | AYRPSETLCGGELVDTLQFVCGDRGFYFSRPASRVSRRSR |
| | | GIVEECCFRSCDLALLETYCATPAKSE |
| INGAP peptide | 260 | EESQKKLPSSRITCPQGSVAYGSYCYSLILIPQTWSNAELSC |
| (islet neogenesis-associated | | QMHFSGHLAFLLSTGEITFVSSLVKNSLTAYQYIWIGLHDP |
| protein) | | SHGTLPNGSGWKWSSSNVLTFYNWERNPSIAADRGYCAV |
| | | LSQKSGFQKWRDFNCENELPYICKFKV |
| Intermedin (AFP-6) | 261 | TQAQLLRVGCVLGTCQVQNLSHRLWQLMGPAGRQDSAP |
| | | VDPSSPHSY |
| Leptin, human | 262 | VPIQKVQDDTKTLIKTIVTRINDISHTQSVSSKQKVTGLDFI |
| | | PGLHPILTLSKMDQTLAVYQQILTSMPSRNVIQISNDLENL |
| | | RDLLHVLAFSKSCHLPWASGLETLDSLGGVLEASGYSTEV |
| | | VALSRLQGSLQDMLWQLDLSPGC |
| Neuromedin (U-8) porcine | 263 | YFLFRPRN |
| Neuromedin (U-9) | 264 | GYFLFRPRN |
| neuromedin (U25) human) | 265 | FRVDEEFQSPFASQSRGYFLFRPRN |
| Neuromedin (U25) pig | 266 | FKVDEEFQGPIVSQNRRYFLFRPRN |
| Neuromedin S, human | 267 | ILQRGSGTAAVDFTKKDHTATWGRPFFLFRPRN |
| Neuromedin U, rat | 268 | YKVNEYQGPVAPSGGFFLFRPRN |
| oxyntomodulin (OXM) | 269 | HSQGTFTSDYSKYLDSRRAQDFVQWLMNTKRNRNNIA |
| Peptide YY (PYY) | 270 | YPIKPEAPGEDASPEELNRYYASLRHYLNLVTRQRY |
| Pramlintide | 271 | KCNTATCATNRLANFLVHSSNNFGPILPPTNVGSNTY-NH2 |
| Urocortin (Ucn-1) | 272 | DNPSLSIDLTFHLLRTLLELARTQSQRERAEQNRIIFDSV |
| Urocortin (Ucn-2) | 273 | IVLSLDVPIGLLQILLEQARARAAREQATTNARILARVGHC |
| Urocortin (Ucn-3) | 274 | FTLSLDVPTNIMNLLFNIAKAKNLRAQAAANAHLMAQI |

[0227] “Adrenomedullin” or “ADM” means the human adrenomedulin peptide hormone and species and sequence variants thereof having at least a portion of the biological activity of mature ADM. ADM is generated from a 185 amino acid preprohormone through consecutive enzymatic cleavage and amidation, resulting in a 52 amino acid bioactive peptide with a measured plasma half-life of 22 min. ADM-containing fusion proteins of the invention may find particular use in diabetes for stimulatory effects on insulin secretion from islet cells for glucose regulation or in subjects with sustained hypotension. The complete genomic infrastructure for human AM has been reported (Ishimitsu, et al., Biochem. Biophys. Res. Commun 203:631-639 (1994)), and analogs of ADM peptides have been cloned, as described in U.S. Pat. No. 6,320,022.

[0228] “Amylin” means the human peptide hormone referred to as amylin, pramlintide, and species variations thereof, as described in U.S. Pat. No. 5,234,906, having at least a portion of the biological activity of mature amylin. Amylin is a 37-amino acid polypeptide hormone co-secreted with insulin by pancreatic beta cells in response to nutrient intake (Koda et al., Lancet 339:1179-1180. 1992), and has been reported to modulate several key pathways of carbohydrate metabolism, including incorporation of glucose into glycogen. Amylin-containing fusion proteins of the invention may find particular use in diabetes and obesity for regulating gastric emptying, suppressing glucagon secretion and food intake, thereby affecting the rate of glucose appearance in the circulation. Thus, the fusion proteins may complement the action of insulin, which regulates the rate of glucose disappearance from the circulation and its uptake by peripheral tissues. Amylin analogues have been cloned, as described in U.S. Pat. Nos. 5,686,411 and 7,271,238. Amylin mimetics can be created that retain biologic activity. For example, pramlintide has the sequence KCNTATCATNRLANFLVHSSNNFGPILPPTNVGSNTY (SEQ ID NO: 271), wherein amino acids from the rat amylin sequence are substituted for amino acids in the human amylin sequence. In one embodiment, the invention contemplates fusion proteins comprising amylin mimetics of the sequence KCNTATCATX₁RLANFLVHSSNNFGX₂ILX₂X₂TNVGSNTY (SEQ ID NO: 275), wherein X₁ is independently N or Q and X₂ is independently S, P or G. In one embodiment, the amylin mimetic incorporated into a composition of this disclosure can have the sequence KCNTATCATNRLANFLVHSSNNFGGILGGTNVGSNTY (SEQ ID NO: 276). In another embodiment, wherein the amylin mimetic is used at the C-terminus of the composition, the mimetic can have the sequence KCNTATCATNRLANFLVHSSNNFGGILGGTNVGSNTY(NH₂) (SEQ ID NO: 276).

[0229] “Calcitonin” (CT) means the human calcitonin protein and species and sequence variants thereof, including salmon calcitonin (“sCT”), having at least a portion of the biological activity of mature CT. CT is a 32 amino acid peptide cleaved from a larger prohormone of the thyroid that appears to function in the nervous and vascular systems, but has also been reported to be a potent hormonal mediator of the satiety reflex. CT is named for its secretion in response to induced hypercalcemia and its rapid hypocalcemic effect. It is produced in and secreted from neuroendocrine cells in the thyroid termed C cells. CT has effects on the osteoclast, and the inhibition of osteoclast functions by CT results in a decrease in bone resorption. In vitro effects of CT include the rapid loss of ruffled borders and decreased release of lysosomal enzymes. A major function of CT(1-32) is to combat acute hypercalcemia in emergency situations and/or protect the skeleton during periods of “calcium stress” such as growth, pregnancy, and lactation. (Reviewed in Becker, JCEM, 89(4): 1512-1525 (2004) and Sexton, Current Medicinal Chemistry 6: 1067-1093 (1999)). Calcitonin-containing fusion proteins of the invention may find particular use for the treatment of osteoporosis and as a therapy for Paget's disease of bone. Synthetic calcitonin peptides have been created, as described in U.S. Pat. Nos. 5,175,146 and 5,364,840.

[0230] “Calcitonin gene related peptide” or “CGRP” means the human CGRP peptide and species and sequence variants thereof having at least a portion of the biological activity of mature CGRP. Calcitonin gene related peptide is a member of the calcitonin family of peptides, which in humans exists in two forms, α-CGRP (a 37 amino acid peptide) and β-CGRP. CGRP has 43-46% sequence identity with human amylin. CGRP-containing fusion proteins of the invention may find particular use in decreasing morbidity associated with diabetes, ameliorating hyperglycemia and insulin deficiency, inhibition of lymphocyte infiltration into the islets, and protection of beta cells against autoimmune destruction. Methods for making synthetic and recombinant CGRP are described in U.S. Pat. No. 5,374,618.

[0231] “Cholecystokinin” or “CCK” means the human CCK peptide and species and sequence variants thereof having at least a portion of the biological activity of mature CCK. CCK-58 is the mature sequence, while the CCK-33 amino acid sequence first identified in humans is the major circulating form of the peptide. The CCK family also includes an 8-amino acid in vivo C-terminal fragment (“CCK-8”), pentagastrin or CCK-5 being the C-terminal peptide CCK(29-33), and CCK-4 being the C-terminal tetrapeptide CCK(30-33). CCK is a peptide hormone of the gastrointestinal system responsible for stimulating the digestion of fat and protein. CCK-33 and CCK-8-containing fusion proteins of the invention may find particular use in reducing the increase in circulating glucose after meal ingestion and potentiating the increase in circulating insulin. Analogues of CCK-8 have been prepared, as described in U.S. Pat. No. 5,631,230. 1002171″Exendin-3″ means a glucose regulating peptide isolated from Heloderma horridum and sequence variants thereof having at least a portion of the biological activity of mature exendin-3. Exendin-3 amide is a specific exendin receptor antagonist from that mediates an increase in pancreatic cAMP, and release of insulin and amylase. Exendin-3-containing fusion proteins of the invention may find particular use in the treatment of diabetes and insulin resistance disorders. The sequence and methods for its assay are described in U.S. Pat. No. 5,424,286.

[0232] Exendin-4″ means a glucose regulating peptide found in the saliva of the Gila-monster Heloderma suspectum, as well as species and sequence variants thereof, and includes the native 39 amino acid sequence His-Gly-Glu-Gly-Thr-Phe-Thr-Ser-Asp-Leu-Ser-Lys-Gln-Met-Glu-Glu-Glu-Ala-Val-Arg-Leu-Phe-Ile-Glu-Trp-Leu-Lys-Asn-Gly-Gly-Pro-Ser-Ser-Gly-Ala-Pro-Pro-Pro-Ser and homologous sequences and peptide mimetics, and variants thereof; natural sequences, such as from primates and non-natural having at least a portion of the biological activity of mature exendin-4. Exendin-4 is an incretin polypeptide hormone that decreases blood glucose, promotes insulin secretion, slows gastric emptying and improves satiety, providing a marked improvement in postprandial hyperglycemia. The exendins have some sequence similarity to members of the glucagon-like peptide family, with the highest identity being to GLP-1 (Goke, et al., J. Biol. Chem., 268:19650-55 (1993)). A variety of homologous sequences can be functionally equivalent to native exendin-4 and GLP-1. Conservation of GLP-1 sequences from different species are presented in Regulatory Peptides 2001 98 p. 1-12. Table 3b shows the sequences from a wide variety of species, while Table 3c shows a list of synthetic GLP-1 analogs; all of which are contemplated for use in the composition described herein. Exendin-4 binds at GLP-1 receptors on insulin-secreting OTC′ cells, and also stimulates somatostatin release and inhibits gastrin release in isolated stomachs (Goke, et al., J. Biol. Chem. 268:19650-55, 1993). As a mimetic of GLP-1, exendin-4 displays a similar broad range of biological activities, yet has a longer half-life than GLP-1, with a mean terminal half-life of 2.4 h. Exenatide is a synthetic version of exendin-4, marketed as Byetta. However, due to its short half-life, exenatide is currently dosed twice daily, limiting its utility. Exendin-4-containing fusion proteins of the invention may find particular use in the treatment of diabetes and insulin resistance disorders.

[0233] ‘Fibroblast growth factor 21’, or “FGF-21” means the human protein encoded by the FGF21 gene, or species and sequence variants thereof having at least a portion of the biological activity of mature FGF21. FGF-21 stimulates glucose uptake in adipocytes but not in other cell types; the effect is additive to the activity of insulin. FGF-21 injection in ob/ob mice results in an increase in Glut1 in adipose tissue. FGF21 also protects animals from diet-induced obesity when over expressed in transgenic mice and lowers blood glucose and triglyceride levels when administered to diabetic rodents (Kharitonenkov A, et al., (2005). “FGF-21 as a novel metabolic regulator”. J. Clin. Invest. 115: 1627-35). FGF-21-containing fusion proteins of the invention may find particular use in treatment of diabetes, including causing increased energy expenditure, fat utilization and lipid excretion. FGF-21 has been cloned, as disclosed in U.S. Pat. No. 6,716,626.

[0234] “FGF-19”, or “fibroblast growth factor 19” means the human protein encoded by the FGF19 gene, or species and sequence variants thereof having at least a portion of the biological activity of mature FGF-19. FGF-19 is a protein member of the fibroblast growth factor (FGF) family. FGF family members possess broad mitogenic and cell survival activities, and are involved in a variety of biological processes. FGF-19 increases liver expression of the leptin receptor, metabolic rate, stimulates glucose uptake in adipocytes, and leads to loss of weight in an obese mouse model (Fu, L, et al. FGF-19-containing fusion proteins of the invention may find particular use in increasing metabolic rate and reversal of dietary and leptin-deficient diabetes. FGF-19 has been cloned and expressed, as described in US Patent Application No. 20020042367.

[0235] “Gastrin” means the human gastrin peptide, truncated versions, and species and sequence variants thereof having at least a portion of the biological activity of mature gastrin. Gastrin is a linear peptide hormone produced by G cells of the duodenum and in the pyloric antrum of the stomach and is secreted into the bloodstream. Gastrin is found primarily in three forms: gastrin-34 (“big gastrin”); gastrin-17 (“little gastrin”); and gastrin-14 (“minigastrin”). It shares sequence homology with CCK. Gastrin-containing fusion proteins of the invention may find particular use in the treatment of obesity and diabetes for glucose regulation. Gastrin has been synthesized, as described in U.S. Pat. No. 5,843,446.

[0236] “Ghrelin” means the human hormone that induces satiation, or species and sequence variants thereof, including the native, processed 27 or 28 amino acid sequence and homologous sequences. Ghrelin is produced mainly by P/D1 cells lining the fundus of the human stomach and epsilon cells of the pancreas that stimulates hunger, and is considered the counterpart hormone to leptin. Ghrelin levels increase before meals and decrease after meals, and can result in increased food intake and increase fat mass by an action exerted at the level of the hypothalamus. Ghrelin also stimulates the release of growth hormone. Ghrelin is acylated at a serine residue by n-octanoic acid; this acylation is essential for binding to the GHS1a receptor and for the GH-releasing capacity of ghrelin. Ghrelin-containing fusion proteins of the invention may find particular use as agonists; e.g., to selectively stimulate motility of the GI tract in gastrointestinal motility disorder, to accelerate gastric emptying, or to stimulate the release of growth hormone. Ghrelin analogs with sequence substitutions or truncated variants, such as described in U.S. Pat. No. 7,385,026, may find particular use as fusion partners to XTEN for use as antagonists for improved glucose homeostasis, treatment of insulin resistance and treatment of obesity. The isolation and characterization of ghrelin has been reported (Kojima M, et al., Ghrelin is a growth-hormone-releasing acylated peptide from stomach. Nature. 1999; 402(6762):656-660.) and synthetic analogs have been prepared by peptide synthesis, as described in U.S. Pat. No. 6,967,237.

[0237] “Glucagon” means the human glucagon glucose regulating peptide, or species and sequence variants thereof, including the native 29 amino acid sequence and homologous sequences; natural, such as from primates, and non-natural sequence variants having at least a portion of the biological activity of mature glucagon. The term “glucagon” as used herein also includes peptide mimetics of glucagon. Native glucagon is produced by the pancreas, released when blood glucose levels start to fall too low, causing the liver to convert stored glycogen into glucose and release it into the bloodstream. While the action of glucagon is opposite that of insulin, which signals the body's cells to take in glucose from the blood, glucagon also stimulates the release of insulin, so that newly-available glucose in the bloodstream can be taken up and used by insulin-dependent tissues. Glucagon-containing fusion proteins of the invention may find particular use in increasing blood glucose levels in individuals with extant hepatic glycogen stores and maintaining glucose homeostasis in diabetes. Glucagon has been cloned, as disclosed in U.S. Pat. No. 4,826,763.

[0238] “GLP-1” means human glucagon like peptide-1 and sequence variants thereof having at least a portion of the biological activity of mature GLP-1. The term “GLP-1” includes human GLP-1(1-37), GLP-1(7-37), and GLP-1(7-36)amide. GLP-1 stimulates insulin secretion, but only during periods of hyperglycemia. The safety of GLP-1 compared to insulin is enhanced by this property and by the observation that the amount of insulin secreted is proportional to the magnitude of the hyperglycemia. The biological half-life of GLP-1(7-37)OH is a mere 3 to 5 minutes (U.S. Pat. No. 5,118,666). GLP-1-containing fusion proteins of the invention may find particular use in the treatment of diabetes and insulin-resistance disorders for glucose regulation. GLP-1 has been cloned and derivatives prepared, as described in U.S. Pat. No. 5,118,666. Non-limited examples of glucagon-like peptide sequences from a wide variety of species, and synthetic analogs thereof, are shown in Tables 3b-3c. In some embodiments of the compositions disclosed herein, where the biologically active moiety can be a biologically active peptide (BP), the BP can comprise a peptide sequence that exhibits at least (about) 80% sequence identity (e.g., at least (about) 81%, at least (about) 82%, at least (about) 83%, at least (about) 84%, at least (about) 85%, at least (about) 86%, at least (about) 87%, at least (about) 88%, at least (about) 89%, at least (about) 90%, at least (about) 91%, at least (about) 92%, at least (about) 93%, at least (about) 94%, at least (about) 95%, at least (about) 96%, at least (about) 97%, at least (about) 98%, at least (about) 99%, or 100% sequence identity) to an amino acid sequence of a glucagon-like peptide (native or synthetic analog) set forth in Tables 3b-3c.

TABLE 3b
Representative Naturally-Occurring GLP-1 Homologs as BP Candidates

| | SEQ ID | |
|---|---|---|
| Gene Name | NO: | Amino Acid Sequence |
| GLP-1 [frog] | 277 | HAEGTYTNDVTEYLEEKAAKEFIEWLIKGKPKKIRYS |
| GLP-la [Xenopus laevis] | 278 | HAEGTFTSDVTQQLDEKAAKEFIDWLINGGPSKEIIS |
| GLP-16 [Xenopus laevis] | 279 | HAEGTYTNDVTEYLEEKAAKEFIIEWLIKGKPK |
| GLP-1c [Xenopus laevis] | 280 | HAEGTFTNDMTNYLEEKAAKEFVGWLIKGRPK |
| Gastric Inhibitory | 281 | HAEGTFISDYSIAMDKIRQQDFVNWLL |
| Polypeptide [Mus musculus] | | |
| Glucose-dependent | 282 | HAEGTFISDYSIAMDKIRQQDFVNWLL |
| insulinotropic polypeptide | | |
| [Equus caballus] | | |
| Glucagon-like peptide | 283 | HADGTFTNDMTSYLDAKAARDFVSWLARSDKS |
| [Petromyzon marinus] | | |
| Glucagon-like peptide | 284 | HAEGTYTSDVSSYLQDQAAKEFVSWLKTGR |
| [Anguilla rostrata] | | |
| Glucagon-like peptide | 285 | HAEGTYTSDVSSYLQDQAAKEFVSWLKTGR |
| [Anguilla anguilla] | | |
| Glucagon-like peptide | 286 | HADGIYTSDVASLTDYLKSKRFVESLSNYNKRQNDRRM |
| [Hydrolagus colliei] | | |
| Glucagon-like peptide | 287 | YADAPYISDVYSYLQDQVAKKWLKSGQDRRE |
| [Amia calva] | | |
| GLUC_ICTPU/38-65 | 288 | HADGTYTSDVSSYLQEQAAKDFITWLKS |
| GLUCL_ANGRO/1-28 | 289 | HAEGTYTSDVSSYLQDQAAKEFVSWLKT |
| GLUC_BOVIN/98-125 | 290 | HAEGTFTSDVSSYLEGQAAKEFIAWLVK |
| GLUC1_LOPAM/91-118 | 291 | HADGTFTSDVSSYLKDQAIKDFVDRLKA |
| GLUCL_HYDCO/1-28 | 292 | HADGIYTSDVASLTDYLKSKRFVESLSN |
| GLUC_CAVPO/53-80 | 293 | HSQGTFTSDYSKYLDSRRAQQFLKWLLN |
| GLUC_CHIBR/1-28 | 294 | HSQGTFTSDYSKHLDSRYAQEFVQWLMN |
| GLUC1_LOPAM/53-80 | 295 | HSEGTFSNDYSKYLEDRKAQEFVRWLMN |
| GLUC_HYDCO/1-28 | 296 | HTDGIFSSDYSKYLDNRRTKDFVQWLLS |
| GLUC_CALMI/1-28 | 297 | HSEGTFSSDYSKYLDSRRAKDFVQWLMS |
| GIP_BOVIN/1-28 | 298 | YAEGTFISDYSIAMDKIRQQDFVNWLLA |
| VIP_MELGA/89-116 | 299 | HADGIFTTVYSHLLAKLAVKRYLHSLIR |
| PACA_CHICK/131-158 | 300 | HIDGIFTDSYSRYRKQMAVKKYLAAVLG |
| VIP_CAVPO/45-72 | 301 | HSDALFTDTYTRLRKQMAMKKYLNSVLN |
| VIP_DIDMA/1-28 | 302 | HSDAVFTDSYTRLLKQMAMRKYLDSILN |
| EXE1_HELSU/1-28 | 303 | HSDATFTAEYSKLLAKLALQKYLESILG |
| SLIB_CAPHI/1-28 | 304 | YADAIFTNSYRKVLGQLSARKLLQDIMN |
| SLIB_RAT/31-58 | 305 | HADAIFTSSYRRILGQLYARKLLHEIMN |
| SLIB_MOUSE/31-58 | 306 | HVDAIFTTNYRKLLSQLYARKVIQDIMN |
| PACA_HUMAN/83-110 | 307 | VAHGILNEAYRKVLDQLSAGKHLQSLVA |
| PACA_SHEEP/83-110 | 308 | VAHGILDKAYRKVLDQLSARRYLQTLMA |
| PACA_ONCNE/82-109 | 309 | HADGMFNKAYRKALGQLSARKYLHSLMA |
| GLUC_BOVIN/146-173 | 310 | HADGSFSDEMNTVLDSLATRDFINWLLQ |
| SECR_CANFA/1-27 | 311 | HSDGTFTSELSRLRESARLQRLLQGLV |
| SECR_CHICK/1-27 | 312 | HSDGLFTSEYSKMRGNAQVQKFIQNLM |
| EXE3_HELHO/48-75 | 313 | HSDGTFTSDLSKQMEEEAVRLFIEWLKN |

TABLE 3c
Representative GLP-1 Synthetic Analogs

| SEQ | |
|---|---|
| ID | |
| NO: | Amino Acid Sequence |
| 314 | HAEGTFTSDVSSYLEGQAAREFIAWLVKGRG |
| 315 | HAEGTFTSDVSSYLEGQAAKEFIAWLVRGRG |
| 316 | HAEGTFTSDVSSYLEGQAAKEFIAWLVKGKG |
| 317 | HAEGTFTSDVSSYLEGQAAREFIAWLVRGKG |
| 318 | HAEGTFTSDVSSYLEGQAAREFIAWLVRGKGR |
| 319 | HAEGTFTSDVSSYLEGQAAREFIAWLVRGRGRK |
| 320 | HAEGTFTSDVSSYLEGQAAREFIAWLVRGRGRRK |
| 321 | HAEGTFTSDVSSYLEGQAAREFIAWLVKGKG |
| 322 | HAEGTFTSDVSSYLEGQAAKEFIAWLVRGKG |
| 323 | HAEGTFTSDVSSYLEGQAAREFIAWLVKGRGRK |
| 324 | HAEGTFTSDVSSYLEGQAAKEFIAWLVRGRGRRK |
| 325 | HAEGTFTSDVSSYLEGQAAREFIAWLVRGKGRK |
| 326 | HAEGTFTSDVSSYLEGQAAREFIAWLVRGKGRRK |
| 327 | HGEGTFTSDVSSYLEGQAAREFIAWLVKGRG |
| 328 | HGEGTFTSDVSSYLEGQAAKEFIAWLVRGRG |
| 329 | HGEGTFTSDVSSYLEGQAAKEFIAWLVKGKG |
| 330 | HGEGTFTSDVSSYLEGQAAREFIAWLVRGKG |
| 331 | HGEGTFTSDVSSYLEGQAAREFIAWLVRGRGRK |
| 332 | HGEGTFTSDVSSYLEGQAAREFIAWLVRGRGRRK |
| 333 | HGEGTFTSDVSSYLEGQAAREFIAWLVKGKG |
| 334 | HGEGTFTSDVSSYLEGQAAKEFIAWLVRGKG |
| 335 | HGEGTFTSDVSSYLEGQAAREFIAWLVKGRGRK |
| 336 | HGEGTFTSDVSSYLEGQAAKEFIAWLVRGRGRRK |
| 337 | HGEGTFTSDVSSYLEGQAAREFIAWLVRGKGRK |
| 338 | HGEGTFTSDVSSYLEGQAAREFIAWLVRGKGRRK |
| 339 | HAEGTFTSDVSSYLEGQAAREFIAWLVRGRGK |
| 340 | HAEGTFTSDVSSYLEGQAAREFIAWLVRGRGRK |
| 341 | HAEGTFTSDVSSYLEGQAAREFIAWLVRGRGRRK |
| 342 | HAEGTFTSDVSSYLEGQAAREFIAWLVRGRGRREK |
| 343 | HAEGTFTSDVSSYLEGQAAREFIAWLVRGRGRREFK |
| 344 | HAEGTFTSDVSSYLEGQAAREFIAWLVRGRGRREFPK |
| 345 | HAEGTFTSDVSSYLEGQAAREFIAWLVRGRGRREFPEK |
| 346 | HAEGTFTSDVSSYLEGQAAREFIAWLVRGRGRREFPEEK |
| 347 | HDEFERHAEGTFTSDVSSYLEGQAAREFIAWLVRGRGK |
| 348 | HDEFERHAEGTFTSDVSSYLEGQAAREFIAWLVRGRGRK |
| 349 | HDEFERHAEGTFTSDVSSYLEGQAAREFIAWLVRGRGRRK |
| 350 | HDEFERHAEGTFTSDVSSYLEGQAAREFIAWLVRGRGRREK |
| 351 | HDEFERHAEGTFTSDVSSYLEGQAAREFIAWLVRGRGRREFK |
| 352 | HDEFERHAEGTFTSDVSSYLEGQAAREFIAWLVRGRGRREFPK |
| 353 | HDEFERHAEGTFTSDVSSYLEGQAAREFIAWLVRGRGRREFPEK |
| 354 | HDEFERHAEGTFTSDVSSYLEGQAAREFIAWLVRGRGRREFPEEK |
| 355 | DEFERHAEGTFTSDVSSYLEGQAAREFIAWLVRGRGRK |
| 356 | DEFERHAEGTFTSDVSSYLEGQAAREFIAWLVRGRGRRK |
| 357 | DEFERHAEGTFTSDVSSYLEGQAAREFIAWLVRGRGRREK |
| 358 | DEFERHAEGTFTSDVSSYLEGQAAREFIAWLVRGRGRREFK |
| 359 | DEFERHAEGTFTSDVSSYLEGQAAREFIAWLVRGRGRREFPK |
| 360 | DEFERHAEGTFTSDVSSYLEGQAAREFIAWLVRGRGRREFPEK |
| 361 | DEFERHAEGTFTSDVSSYLEGQAAREFIAWLVRGRGRREFPEEK |
| 362 | EFERHAEGTFTSDVSSYLEGQAAREFIAWLVRGRGK |
| 363 | EFERHAEGTFTSDVSSYLEGQAAREFIAWLVRGRGRK |
| 364 | EFERHAEGTFTSDVSSYLEGQAAREFIAWLVRGRGRRK |
| 365 | EFERHAEGTFTSDVSSYLEGQAAREFIAWLVRGRGRREK |
| 366 | EFERHAEGTFTSDVSSYLEGQAAREFIAWLVRGRGRREFK |
| 367 | EFERHAEGTFTSDVSSYLEGQAAREFIAWLVRGRGRREFPK |
| 368 | EFERHAEGTFTSDVSSYLEGQAAREFIAWLVRGRGRREFPEK |
| 369 | EFERHAEGTFTSDVSSYLEGQAAREFIAWLVRGRGRREFPEEK |
| 370 | FERHAEGTFTSDVSSYLEGQAAREFIAWLVRGRGK |
| 371 | FERHAEGTFTSDVSSYLEGQAAREFIAWLVRGRGRK |
| 372 | FERHAEGTFTSDVSSYLEGQAAREFIAWLVRGRGRRK |
| 373 | FERHAEGTFTSDVSSYLEGQAAREFIAWLVRGRGRREK |
| 374 | FERHAEGTFTSDVSSYLEGQAAREFIAWLVRGRGRREFK |
| 375 | FERHAEGTFTSDVSSYLEGQAAREFIAWLVRGRGRREFPK |
| 376 | FERHAEGTFTSDVSSYLEGQAAREFIAWLVRGRGRREFPEK |
| 377 | FERHAEGTFTSDVSSYLEGQAAREFIAWLVRGRGRREFPEEK |
| 378 | ERHAEGTFTSDVSSYLEGQAAREFIAWLVRGRGK |
| 379 | ERHAEGTFTSDVSSYLEGQAAREFIAWLVRGRGRK |
| 380 | ERHAEGTFTSDVSSYLEGQAAREFIAWLVRGRGRRK |
| 381 | ERHAEGTFTSDVSSYLEGQAAREFIAWLVRGRGRREK |
| 382 | ERHAEGTFTSDVSSYLEGQAAREFIAWLVRGRGRREFK |
| 383 | ERHAEGTFTSDVSSYLEGQAAREFIAWLVRGRGRREFPK |
| 384 | ERHAEGTFTSDVSSYLEGQAAREFIAWLVRGRGRREFPEK |
| 385 | ERHAEGTFTSDVSSYLEGQAAREFIAWLVRGRGRREFPEEK |
| 386 | RHAEGTFTSDVSSYLEGQAAREFIAWLVRGRGK |
| 387 | RHAEGTFTSDVSSYLEGQAAREFIAWLVRGRGRK |
| 388 | RHAEGTFTSDVSSYLEGQAAREFIAWLVRGRGRRK |
| 389 | RHAEGTFTSDVSSYLEGQAAREFIAWLVRGRGRREK |
| 390 | RHAEGTFTSDVSSYLEGQAAREFIAWLVRGRGRREFK |
| 391 | RHAEGTFTSDVSSYLEGQAAREFIAWLVRGRGRREFPK |
| 392 | RHAEGTFTSDVSSYLEGQAAREFIAWLVRGRGRREFPEK |
| 393 | RHAEGTFTSDVSSYLEGQAAREFIAWLVRGRGRREFPEEK |
| 394 | HDEFERHAEGTFTSDVSSYLEGQAAREFIAWLVKGRGK |
| 395 | HDEFERHAEGTFTSDVSSYLEGQAAKEFIAWLVRGRGK |
| 396 | HDEFERHAEGTFTSDVSSYLEGQAAREFIAWLVRGKGK |
| 397 | HAEGTFTSDVSSYLEGQAAREFIAWLVKGRGK |
| 398 | HAEGTFTSDVSSYLEGQAAKEFIAWLVRGRGK |
| 399 | HAEGTFTSDVSSYLEGQAAREFIAWLVRGKGK |
| 400 | HAEGTFTSDVSSYLEGQAAREFIAWLVRGRGK |
| 401 | HDEFERHAEGTFTSDVSSYLEGQAAREFIAWLVKGRGRK |
| 402 | HDEFERHAEGTFTSDVSSYLEGQAAKEFIAWLVRGRGRK |
| 403 | HDEFERHAEGTFTSDVSSYLEGQAAREFIAWLVRGKGRK |
| 404 | HAEGTFTSDVSSYLEGQAAREFIAWLVKGRGRK |
| 405 | HAEGTFTSDVSSYLEGQAAKEFIAWLVRGRGRK |
| 406 | HAEGTFTSDVSSYLEGQAAREFIAWLVRGKGRK |
| 407 | HGEGTFTSDVSSYLEGQAAREFIAWLVKGRGK |
| 408 | HGEGTFTSDVSSYLEGQAAREFIAWLVRGKGK |

[0239] GLP native sequences may be described by several sequence motifs, which are presented below. Letters in brackets represent acceptable amino acids at each sequence position: [HVY] [AGISTV] [DEHQ] [AG] [ILMPSTV] [FLY] [DINST] [ADEKNST] [ADENSTV] [LMVY] [ANRSTY] [EHIKNQRST] [AHILMQVY] [LMRT] [ADEGKQS] [ADEGKNQSY] [AEIKLMQR] [AKQRSVY] [AILMQSTV] [GKQR] [DEKLQR] [FHLVWY] [ILV] [ADEGHIKNQRST] [ADEGNRSTW] [GILVW] [AIKLMQSV] [ADGIKNQRST] [GKRSY]. In addition, synthetic analogs of GLP-1 can be useful as fusion partners to a masking moiety (such as XTEN) to create a fusion composition with biological activity useful in treatment of glucose-related disorders. Further sequences homologous to Exendin-4 or GLP-1 may be found by standard homology searching techniques.

[0240] “GLP-2” means human glucagon like peptide-2 and sequence variants thereof having at least a portion of the biological activity of mature GLP-2. More particularly, GLP-2 is a 33 amino acid peptide, co-secreted along with GLP-1 from intestinal endocrine cells in the small and large intestine.

[0241] “IGF-1” or “Insulin-like growth factor 1” means the human IGF-1 protein and species and sequence variants thereof having at least a portion of the biological activity of mature IGF-1. IGF-1, which was once called somatomedin C, is a polypeptide protein anabolic hormone similar in molecular structure to insulin, and that modulates the action of growth hormone. IGF-1 consists of 70 amino acids and is produced primarily by the liver as an endocrine hormone as well as in target tissues in a paracrine/autocrine fashion. IGF-1-containing fusion proteins of the invention may find particular use in the treatment of diabetes and insulin-resistance disorders for glucose regulation. IGF-1 has been cloned and expressed in E. coli and yeast, as described in U.S. Pat. No. 5,324,639.

[0242] “IGF-2” or “Insulin-like growth factor 2” means the human IGF-2 protein and species and sequence variants thereof having at least a portion of the biological activity of mature IGF-2. IGF-2 is a polypeptide protein hormone similar in molecular structure to insulin, with a primary role as a growth-promoting hormone during gestation. IGF-2 has been cloned, as described in Bell G I, et al. Isolation of the human insulin-like growth factor genes: insulin-like growth factor II and insulin genes are contiguous. Proc Natl Acad Sci USA. 1985. 82(19):6450-4.

[0243] “INGAP”, or “islet neogenesis-associated protein”, or “pancreatic beta cell growth factor” means the human INGAP peptide and species and sequence variants thereof having at least a portion of the biological activity of mature INGAP. INGAP is capable of initiating duct cell proliferation, a prerequisite for islet neogenesis. INGAP-containing fusion proteins of the invention may find particular use in the treatment or prevention of diabetes and insulin-resistance disorders. INGAP has been cloned and expressed, as described in R Rafaeloff R, et al., Cloning and sequencing of the pancreatic islet neogenesis associated protein (INGAP) gene and its expression in islet neogenesis in hamsters. J Clin Invest. 1997. 99(9): 2100-2109.

[0244] “Intermedin” or “AFP-6” means the human intermedin peptide and species and sequence variants thereof having at least a portion of the biological activity of mature intermedin. Intermedin is a ligand for the calcitonin receptor-like receptor. Intermedin treatment leads to blood pressure reduction both in normal and hypertensive subjects, as well as the suppression of gastric emptying activity, and is implicated in glucose homeostasis. Intermedin-containing fusion proteins of the invention may find particular use in the treatment of diabetes, insulin-resistance disorders, and obesity. Intermedin peptides and variants have been cloned, as described in U.S. Pat. No. 6,965,013.

[0245] “Leptin” means the naturally occurring leptin from any species, as well as biologically active D-isoforms, or fragments and sequence variants thereof. Leptin plays a key role in regulating energy intake and energy expenditure, including appetite and metabolism. Leptin-containing fusion proteins of the invention may find particular use in the treatment of diabetes for glucose regulation, insulin-resistance disorders, and obesity. Leptin is the polypeptide product of the ob gene as described in the International Patent Pub. No. WO 96/05309. Leptin has been cloned, as described in U.S. Pat. No. 7,112,659, and leptin analogs and fragments in U.S. Pat. Nos. 5,521,283, 5,532,336, PCT/US96/22308 and PCT/US96/01471.

[0246] “Neuromedin” means the neuromedin family of peptides including neuromedin U and S peptides, and sequence variants thereof. The native active human neuromedin U peptide hormone is neuromedin-U25, particularly its amide form. Of particular interest are their processed active peptide hormones and analogs, derivatives and fragments thereof. Included in the neuromedin U family are various truncated or splice variants, e.g., FLFHYSKTQKLGKSNVVEELQSPFASQSRGYFLFRPRN (SEQ ID NO: 409). Exemplary of the neuromedin S family is human neuromedin S with the sequence ILQRGSGTAAVDFTKKDHTATWGRPFFLFRPRN (SEQ ID NO: 267), particularly its amide form. Neuromedin fusion proteins of the invention may find particular use in treating obesity, diabetes, reducing food intake, and other related conditions and disorders as described herein. Of particular interest are neuromedin modules combined with an amylin family peptide, an exendin peptide family or a GLP I peptide family module.

[0247] “Oxyntomodulin”, or “OXM” means human oxyntomodulin and species and sequence variants thereof having at least a portion of the biological activity of mature OXM. OXM is a 37 amino acid peptide produced in the colon that contains the 29 amino acid sequence of glucagon followed by an 8 amino acid carboxyterminal extension. OXM has been found to suppress appetite. OXM-containing fusion proteins of the invention may find particular use in the treatment of diabetes for glucose regulation, insulin-resistance disorders, obesity, and can be used as a weight loss treatment.

[0248] “PYY” means human peptide YY polypeptide and species and sequence variants thereof having at least a portion of the biological activity of mature PYY. PYY includes both the human full length, 36 amino acid peptide, PYY₁₋₃₆ and PYY₃₋₃₆ which have the PP fold structural motif. PYY inhibits gastric motility and increases water and electrolyte absorption in the colon. PYY may also suppress pancreatic secretion. PPY-containing fusion proteins of the invention may find particular use in the treatment of diabetes for glucose regulation, insulin-resistance disorders, and obesity. Analogs of PYY have been prepared, as described in U.S. Pat. Nos. 5,604,203, 5,574,010 and 7,166,575.

[0249] “Urocortin” means a human urocortin peptide hormone and sequence variants thereof having at least a portion of the biological activity of mature urocortin. There are three human urocortins: Ucn-1, Ucn-2 and Ucn-3. Further urocortins and analogs have been described in U.S. Pat. No. 6,214,797. Urocortins Ucn-2 and Ucn-3 have food-intake suppression, antihypertensive, cardioprotective, and inotropic properties. Ucn-2 and Ucn-3 have the ability to suppress the chronic HPA activation following a stressful stimulus such as dieting/fasting, and are specific for the CRF type 2 receptor and do not activate CRF-R1 which mediates ACTH release. Therapeutic agents comprising urocortin, e.g., Ucn-2 or Ucn-3, may be useful for vasodilation and thus for cardiovascular uses such as chronic heart failure. Urocortin-containing fusion proteins of the invention may also find particular use in treating or preventing conditions associated with stimulating ACTH release, hypertension due to vasodilatory effects, inflammation mediated via other than ACTH elevation, hyperthermia, appetite disorder, congestive heart failure, stress, anxiety, and psoriasis. Urocortin-containing fusion proteins may also be combined with a natriuretic peptide module, amylin family, and exendin family, or a GLP 1 family module to provide an enhanced cardiovascular benefit, e.g. treating CHF, as by providing a beneficial vasodilation effect.

### Metabolic Disease and Cardiovascular Proteins

[0250] Metabolic and cardiovascular diseases represent a substantial health care burden in most developed nations, with cardiovascular diseases remaining the number one cause of death and disability in the United States and most European countries. Metabolic diseases and disorders include a large variety of conditions affecting the organs, tissues, and circulatory system of the body. Chief amongst these is diabetes; one of the leading causes of death in the United States, as it results in pathology and metabolic dysfunction in both the vasculature, central nervous system, major organs, and peripheral tissues. Insulin resistance and hyperinsulinemia have also been linked with two other metabolic disorders that pose considerable health risks: impaired glucose tolerance and metabolic obesity. Impaired glucose tolerance is characterized by normal glucose levels before eating, with a tendency toward elevated levels (hyperglycemia) following a meal. These individuals are considered to be at higher risk for diabetes and coronary artery disease. Obesity is also a risk factor for the group of conditions called insulin resistance syndrome, or “Syndrome X,” as is hypertension, coronary artery disease (arteriosclerosis), and lactic acidosis, as well as related disease states. The pathogenesis of obesity is believed to be multifactorial but an underlying problem is that in the obese, nutrient availability and energy expenditure are not in balance until there is excess adipose tissue.

[0251] Dyslipidemia is a frequent occurrence among diabetics and subjects with cardiovascular disease; typically characterized by parameters such as elevated plasma triglycerides, low HDL (high density lipoprotein) cholesterol, normal to elevated levels of LDL (low density lipoprotein) cholesterol and increased levels of small dense, LDL particles in the blood. Dyslipidemia and hypertension is a main contributor to an increased incidence of coronary events, renal disease, and deaths among subjects with metabolic diseases like diabetes and cardiovascular disease.

[0252] Cardiovascular disease can be manifest by many disorders, symptoms and changes in clinical parameters involving the heart, vasculature and organ systems throughout the body, including aneurysms, angina, atherosclerosis, cerebrovascular accident (Stroke), cerebrovascular disease, congestive heart failure, coronary artery disease, myocardial infarction, reduced cardiac output and peripheral vascular disease, hypertension, hypotension, blood markers (e.g., C-reactive protein, BNP, and enzymes such as CPK, LDH, SGPT, SGOT), amongst others.

[0253] Most metabolic processes and many cardiovascular parameters are regulated by multiple peptides and hormones (“metabolic proteins”), and many such peptides and hormones, as well as analogues thereof, have found utility in the treatment of such diseases and disorders. However, the use of therapeutic peptides and/or hormones, even when augmented by the use of small molecule drugs, has met with limited success in the management of such diseases and disorders. In particular, dose optimization is important for drugs and biologics used in the treatment of metabolic diseases, especially those with a narrow therapeutic window. Hormones in general, and peptides involved in glucose homeostasis often have a narrow therapeutic window. The narrow therapeutic window, coupled with the fact that such hormones and peptides typically have a short half-life which necessitates frequent dosing in order to achieve clinical benefit, results in difficulties in the management of such patients. Therefore, there remains a need for therapeutics with broader therapeutic window and increased efficacy and safety in the treatment of metabolic diseases.

[0254] In some embodiments of the compositions, as disclosed herein in this disclosure, the biologically active peptide (BP) can comprise a biologically active metabolic protein, and the composition can have utility in the treatment of metabolic and cardiovascular diseases and disorders. The metabolic proteins can include any protein of biologic, therapeutic, or prophylactic interest or function that is useful for preventing, treating, mediating, or ameliorating a metabolic or cardiovascular disease, disorder or condition. Table 3d provides a non-limiting list of such sequences of metabolic BPs that can be encompassed by the compositions (e.g., the therapeutic agents) of the invention. In some embodiments of the compositions disclosed herein, where the biologically active moiety is a biologically active peptide (BP), the BP can comprise a peptide sequence that exhibits at least (about) 80% sequence identity (e.g., at least (about) 81%, at least (about) 82%, at least (about) 83%, at least (about) 84%, at least (about) 85%, at least (about) 86%, at least (about) 87%, at least (about) 88%, at least (about) 89%, at least (about) 90%, at least (about) 91%, at least (about) 92%, at least (about) 93%, at least (about) 94%, at least (about) 95%, at least (about) 96%, at least (about) 97%, at least (about) 98%, at least (about) 99%, or 100% sequence identity) to an amino acid sequence of a metabolic protein set forth in Table 3d.

TABLE 3d
Biologically Active Proteins Relating to Metabolic Disorders and Cardiology

| | SEQ ID | |
|---|---|---|
| Name of Protein | NO: | Sequence |
| Anti-CD3 | | See U.S. Pat. Nos. 5,885,573 and 6,491,916 |
| IL-1ra, human full length | 410 | MEICRGLRSHLITLLLFLFHSETICRPSGRKSSKMQAFRIWD |
| | | VNQKTFYLRNNQLVAGYLQGPNVNLEEKIDVVPIEPHALF |
| | | LGIHGGKMCLSCVKSGDETRLQLEAVNITDLSENRKQDKR |
| | | FAFIRSDSGPTTSFESAACPGWFLCTAMEADQPVSLTNMP |
| | | DEGVMVTKFYFQEDE |
| IL-1ra, Dog | 411 | METCRCPLSYLISFLLFLPHSETACRLGKRPCRMQAFRIWD |
| | | VNQKTFYLRNNQLVAGYLQGSNTKLEEKLDVVPVEPHAV |
| | | FLGIHGGKLCLACVKSGDETRLQLEAVNITDLSKNKDQDK |
| | | RFTFILSDSGPTTSFESAACPGWFLCTALEADRPVSLTNRPE |
| | | EAMMVTKFYFQKE |
| IL-1ra, Rabbit | 412 | MRPSRSTRRHLISLLLFLFHSETACRPSGKRPCRMQAFRIW |
| | | DVNQKTFYLRNNQLVAGYLQGPNAKLEERIDVVPLEPQLL |
| | | FLGIQRGKLCLSCVKSGDKMKLHLEAVNITDLGKNKEQD |
| | | KRFTFIRSNSGPTTTFESASCPGWFLCTALEADQPVSLTNTP |
| | | DDSIVVTKFYFQED |
| IL-1ra, Rat | 413 | MEICRGPYSHLISLLLILLFRSESAGHIPAGKRPCKMQAFRI |
| | | WDTNQKTFYLRNNQLIAGYLQGPNTKLEEKIDMVPIDFRN |
| | | VFLGIHGGKLCLSCVKSGDDTKLQLEEVNITDLNKNKEED |
| | | KRFTFIRSETGPTTSFESLACPGWFLCTTLEADHPVSLTNTP |
| | | KEPCTVTKFYFQED |
| IL-1ra, Mouse | 414 | MEICWGPYSHLISLLLILLFHSEAACRPSGKRPCKMQAFRI |
| | | WDTNQKTFYLRNNQLIAGYLQGPNIKLEEKIDMVPIDLHS |
| | | VFLGIHGGKLCLSCAKSGDDIKLQLEEVNITDLSKNKEEDK |
| | | RFTFIRSEKGPTTSFESAACPGWFLCTTLEADRPVSLTNTPE |
| | | EPLIVTKFYFQEDQ |
| Anakinra | 415 | MRPSGRKSSKMQAFRIWDVNQKTFYLRNNQLVAGYLQGP |
| | | NVNLEEKIDVVPIEPHALFLGIHGGKMCLSCVKSGDETRLQ |
| | | LEAVNITDLSENRKQDKRFAFIRSDSGPTTSFESAACPGWF |
| | | LCTAMEADQPVSLTNMPDEGVMVTKFYFQEDE |
| α-natriuretic peptide (ANP) | 416 | SLRRSSCFGGRMDRIGAQSGLGCNSFRY |
| β-natriuretic peptide, human | 417 | SPKMVQGSGGFGRKMDRISSSSGLGCKVLRRH |
| (BNP human) | | |
| Brain natriuretic | 418 | NSKMAHSSSCFGQKIDRIGAVSRLGCDGLRLF |
| peptide, Rat; (BNP Rat) | | |
| C-type natriuretic peptide | 419 | GLSKGCFGLKLDRIGSMSGLGC |
| (CNP, porcine) | | |
| Fibroblast growth factor 2 | 420 | PALPEDGGSGAFPPGHFKDPKRLYCKNGGFFLRIHPDGRV |
| (FGF-2) | | DGVREKSDPHIKLQLQAEERGVVSIKGVCANRYLAMKED |
| | | GRLLASKCVTDECFFFERLESNNYNTYRS RKYTSWYVAL |
| | | KRTGQYKLGS KTGPGQKAIL FLPMSAKS |
| TNF receptor (TNFR) | 421 | LPAQVAFTPYAPEPGSTCRLREYYDQTAQMCCSKCSPGQH |
| | | AKVFCTKTSDTVCDSCEDSTYTQLWNWVPECLSCGSRCSS |
| | | DQVETQACTREQNRICTCRPGWYCALSKQEGCRLCAPLR |
| | | KCRPGFGVARPGTETSDVVCKPCAPGTFSNTTSSTDICRPH |
| | | QICNVVAIPGNASMDAVCTSTSPTRSMAPGAVHLPQPVST |
| | | RSQHTQPTPEPSTAPSTSFLLPMGPSPPAEGSTGD |

[0255] “Anti-CD3” means a monoclonal antibody against the T cell surface protein CD3, species and sequence variants, and fragments thereof, including OKT3 (also called muromonab) and humanized anti-CD3 monoclonal antibody (hOKT31(Ala-Ala))(KC Herold et al., New England Journal of Medicine 346:1692-1698. 2002) Anti-CD3 prevents T-cell activation and proliferation by binding the T-cell receptor complex present on all differentiated T cells. Anti-CD3-containing fusion proteins of the invention may find particular use to slow new-onset Type 1 diabetes, including use of the anti-CD3 as a therapeutic effector as well as a targeting moiety for a second therapeutic BP in the composition of this disclosure. The sequences for the variable region and the creation of an anti-CD3 have been described in U.S. Pat. Nos. 5,885,573 and 6,491,916.

[0256] “IL-1ra” means the human IL-1 receptor antagonist protein and species and sequence variants thereof, including the sequence variant anakinra (Kineret®), having at least a portion of the biological activity of mature IL-1ra. Human IL-1ra is a mature glycoprotein of 152 amino acid residues. The inhibitory action of IL-1ra results from its binding to the type I IL-1 receptor. The protein has a native molecular weight of 25 kDa, and the molecule shows limited sequence homology to IL-1α (19%) and IL-1β (26%). Anakinra is a nonglycosylated, recombinant human IL-1ra and differs from endogenous human IL-1ra by the addition of an N-terminal methionine. A commercialized version of anakinra is marketed as Kineret®. It binds with the same avidity to IL-1 receptor as native IL-1ra and IL-1b, but does not result in receptor activation (signal transduction), an effect attributed to the presence of only one receptor binding motif on IL-1ra versus two such motifs on IL-1α and IL-1β. Anakinra has 153 amino acids and 17.3 kD in size, and has a reported half-life of approximately 4-6 hours.

[0257] Increased IL-1 production has been reported in patients with various viral, bacterial, fungal, and parasitic infections; intravascular coagulation; high-dose IL-2 therapy; solid tumors; leukemias; Alzheimer's disease; HIV-1 infection; autoimmune disorders; trauma (surgery); hemodialysis; ischemic diseases (myocardial infarction); noninfectious hepatitis; asthma; UV radiation; closed head injury; pancreatitis; peritonitis; graft-versus-host disease; transplant rejection; and in healthy subjects after strenuous exercise. There is an association of increased IL-1b production in patients with Alzheimer's disease and a possible role for IL 1 in the release of the amyloid precursor protein. IL-1 has also been associated with diseases such as type 2 diabetes, obesity, hyperglycemia, hyperinsulinemia, type 1 diabetes, insulin resistance, retinal neurodegenerative processes, disease states and conditions characterized by insulin resistance, acute myocardial infarction (AMI), acute coronary syndrome (ACS), atherosclerosis, chronic inflammatory disorders, rheumatoid arthritis, degenerative intervertebral disc disease, sarcoidosis, Crohn's disease, ulcerative colitis, gestational diabetes, excessive appetite, insufficient satiety, metabolic disorders, glucagonomas, secretory disorders of the airway, osteoporosis, central nervous system disease, restenosis, neurodegenerative disease, renal failure, congestive heart failure, nephrotic syndrome, cirrhosis, pulmonary edema, hypertension, disorders wherein the reduction of food intake is desired, irritable bowel syndrome, myocardial infarction, stroke, post-surgical catabolic changes, hibernating myocardium, diabetic cardiomyopathy, insufficient urinary sodium excretion, excessive urinary potassium concentration, conditions or disorders associated with toxic hypervolemia, polycystic ovary syndrome, respiratory distress, chronic skin ulcers, nephropathy, left ventricular systolic dysfunction, gastrointestinal diarrhea, postoperative dumping syndrome, irritable bowel syndrome, critical illness polyneuropathy (CIPN), systemic inflammatory response syndrome (SIRS), dyslipidemia, reperfusion injury following ischemia, and coronary heart disease risk factor (CHDRF) syndrome. IL-1ra-containing fusion proteins of the invention may find particular use in the treatment of any of the foregoing diseases and disorders. IL-1ra has been cloned, as described in U.S. Pat. Nos. 5,075,222 and 6,858,409.

[0258] “Natriuretic peptides” means atrial natriuretic peptide (ANP), brain natriuretic peptide (BNP or B-type natriuretic peptide) and C-type natriuretic peptide (CNP); both human and non-human species and sequence variants thereof having at least a portion of the biological activity of the mature counterpart natriuretic peptides. Alpha atrial natriuretic peptide (aANP) or (ANP) and brain natriuretic peptide (BNP) and type C natriuretic peptide (CNP) are homologous polypeptide hormones involved in the regulation of fluid and electrolyte homeostasis. Sequences of useful forms of natriuretic peptides are disclosed in U.S. Patent Publication 20010027181. Examples of ANPs include human ANP (Kangawa et al., BBRC 118:131 (1984)) or that from various species, including pig and rat ANP (Kangawa et al., BBRC 121:585 (1984)). Sequence analysis reveals that preproBNP consists of 134 residues and is cleaved to a 108-amino acid ProBNP. Cleavage of a 32-amino acid sequence from the C-terminal end of ProBNP results in human BNP (77-108), which is the circulating, physiologically active form. The 32-amino acid human BNP involves the formation of a disulfide bond (Sudoh et al., BBRC 159:1420 (1989)) and U.S. Pat. Nos. 5,114,923, 5,674,710, 5,674,710, and 5,948,761. Compositions-containing one or more natriuretic functions may be useful in treating hypertension, diuresis inducement, natriuresis inducement, vascular conduct dilatation or relaxation, natriuretic peptide receptors (such as NPR-A) binding, 112apida secretion suppression from the kidney, aldostrerone secretion suppression from the adrenal gland, treatment of cardiovascular diseases and disorders, reducing, stopping or reversing cardiac remodeling after a cardiac event or as a result of congestive heart failure, treatment of renal diseases and disorders; treatment or prevention of ischemic stroke, and treatment of asthma.

[0259] “FGF-2” or heparin-binding growth factor 2, means the human FGF-2 protein, and species and sequence variants thereof having at least a portion of the biological activity of the mature counterpart. FGF-2 had been shown to stimulate proliferation of neural stem cells differentiated into striatal-like neurons and protect striatal neurons in toxin-induced models of Huntington Disease, and also my have utility in treatment of cardiac reperfusion injury, and may have endothelial cell growth, anti-angiogenic and tumor suppressive properties, wound healing, as well as promoting fracture healing in bones. FGF-2 has been cloned, as described in Burgess, W. H. and Maciag, T., Ann. Rev. Biochem., 58:575-606 (1989); Coulier, F., et al., 1994, Prog. Growth Factor Res. 5:1; and the PCT publication WO 87/01728.

[0260] “TNF receptor” means the human receptor for TNF, and species and sequence variants thereof having at least a portion of the biological receptor activity of mature TNFR. P75 TNF Receptor molecule is the extracellular domain of p75 TNF receptor, which is from a family of structurally homologous receptors which includes the p55 TNF receptor. TNFα and TNFβ (TNF ligands) compete for binding to the p55 and p75 TNF receptors. The x-ray crystal structure of the complex formed by the extracellular domain of the human p55 TNF receptor and TNFβ has been determined (Banner et al. Cell 73:431, 1993, incorporated herein by reference).

### Growth Hormone Proteins

[0261] “Growth Hormone” or “GH” means the human growth hormone protein and species and sequence variants thereof, and includes, but is not limited to, the 191 single-chain amino acid human sequence of GH. Thus, GH can be the native, full-length protein or can be a truncated fragment or a sequence variant that retains at least a portion of the biological activity of the native protein. Effects of GH on the tissues of the body can generally be described as anabolic. Like most other protein hormones, GH acts by interacting with a specific plasma membrane receptor, referred to as growth hormone receptor. There are two known types of human GH (hereinafter “hGH”) derived from the pituitary gland: one having a molecular weight of about 22,000 daltons (22 kD hGH) and the other having a molecular weight of about 20,000 daltons (20 kD hGH). The 20 kD HGH has an amino acid sequence that corresponds to that of 22 kD hGH consisting of 191 amino acids except that 15 amino acid residues from the 32^{nd} to the 46^{th} of 22 kD hGH are missing. Some reports have shown that the 20 kD hGH has been found to exhibit lower risks and higher activity than 22 kD hGH. The invention also contemplates use of the 20 kD hGH as being appropriate for use as a biologically active polypeptide for the compositions of this disclosure.

[0262] The invention contemplates inclusion in the compositions of any GH homologous sequences, sequence fragments that are natural, such as from primates, mammals (including domestic animals), and non-natural sequence variants which retain at least a portion of the biologic activity or biological function of GH and/or that are useful for preventing, treating, mediating, or ameliorating a GH-related disease, deficiency, disorder or condition. Non-mammalian GH sequences are well-described in the literature. For example, a sequence alignment of fish GHs can be found in Genetics and Molecular Biology 2003 26 p. 295-300. An analysis of the evolution of avian GH sequences is presented in Journal of Evolutionary Biology 2006 19 p. 844-854. In addition, native sequences homologous to human GH may be found by standard homology searching techniques, such as NCBI BLAST.

[0263] In one embodiment, the GH incorporated into the subject compositions can be a recombinant polypeptide with a sequence corresponding to a protein found in nature. In another embodiment, the GH can be a sequence variant, fragment, homolog, or a mimetics of a natural sequence that retains at least a portion of the biological activity of the native GH. Table 3f provides a non-limiting list of sequences of GHs from a wide variety of mammalian species that are encompassed by the compositions of this disclosure. Any of these GH sequences or homologous derivatives constructed by shuffling individual mutations between species or families may be useful for the fusion proteins of this invention. In some embodiments of the compositions disclosed herein, where the biologically active moiety can be a biologically active peptide (BP), the BP can comprise a peptide sequence that exhibits at least (about) 80% sequence identity (e.g., at least (about) 81%, at least (about) 82%, at least (about) 83%, at least (about) 84%, at least (about) 85%, at least (about) 86%, at least (about) 87%, at least (about) 88%, at least (about) 89%, at least (about) 90%, at least (about) 91%, at least (about) 92%, at least (about) 93%, at least (about) 94%, at least (about) 95%, at least (about) 96%, at least (about) 97%, at least (about) 98%, at least (about) 99%, or 100% sequence identity) to an amino acid sequence of a growth hormone set forth in Table 3f.

TABLE 3f
Growth Hormone Amino Acid Sequences from Animal Species

| | SEQ | |
|---|---|---|
| Species GH | ID NO: | Amino Acid Sequence |
| Man | 422 | FPTIPLSRLFDNAMLRAHRLHQLAFDTYQEFEEAYIPKEQKYSFLQNPQTSL |
| | | CFSESIPTPSNREETQQKSNLELLRISLLLIQSWLEPVQFLRSVFANSLVYGAS |
| | | DSNVYDLLKDLEEGIQTLMGRLEDGSPRTGQIFKQTYSKFDTNSHNDDALL |
| | | KNYGLLYCFRKDMDKVETFLRIVQCRSVEGSCGF |
| Pig | 423 | FPAMPLSSLFANAVLRAQHLHQLAADTYKEFERAYIPEGQRYSIQNAQAAF |
| | | CFSETIPAPTGKDEAQQRSDVELLRFSLLLIQSWLGPVQFLSRVFTNSLVFGT |
| | | SDRVYEKLKDLEEGIQALMRELEDGSPRAGQILKQTYDKFDTNLRSDDALL |
| | | KNYGLLSCFKKDLHKAETYLRV MKCRRFVESSCAF |
| Alpaca | 424 | FPAMPLSSLFANAVLRAQHLHQLAADTYKEFERTYIPEGQRYSIQNAQAAF |
| | | CFSETIPAPTGKDEAQQRSDVELLRFSLLLIQSWLGPVQFLSRVFTNSLVFGT |
| | | SDRVYEKLKDLEEGIQALMRELEDGSPRAGQILRQTYDKFDTNLRSDDALL |
| | | KNYGLLSCFKKDLHKAETYLRV MKCRRFVESSCAF |
| Camel | 425 | FPAMPLSSLFANAVLRAQHLHQLAADTYKEFERTYIPEGQRYSIQNAQAAF |
| | | CFSETIPAPTGKDEAQQRSDVELLRFSLLLIQSWLGPVQFLSRVFTNSLVFGT |
| | | SDRVYEKLKDLEEGIQALMRELEDGSPRAGQILRQTYDKFDTNLRSDDALL |
| | | KNYGLLSCFKKDLHKAETYLRV MKCRRFVESSCAF |
| Horse | 426 | FPAMPLSSLFANAVLRAQHLHQLAADTYKEFERAYIPEGQRYSIQNAQAAF |
| | | CFSETIPAPTGKDEAQQRSDMELLRFSLLLIQSWLGPVQLLSRVFTNSLVFG |
| | | TSDRVYEKLRDLEEGIQALMRELEDGSPRAGQILKQTYDKFDTNLRSDDAL |
| | | LKNYGLLSCFKKDLHKAETYLRV MKCRRFVESSCAF |
| Elephant | 427 | FPAMPLSSLFANAVLRAQHLHQLAADTYKEFERAYIPEGQRYSIQNAQAAF |
| | | CFSETIPAPTGKDEAQQRSDVELLRFSLLLIQSWLGPVQFLSRVFTNSLVFGT |
| | | SDRVYEKLKDLEEGIQALMRELEDGSPRPGQVLKQTYDKFDTNMRSDDAL |
| | | LKNYGLLSCFKKDLHKAETYLRV MKCRRFVESSCAF |
| Red fox | 428 | FPAMPLSSLFANAVLRAQHLHQLAADTYKEFERAYIPEGQRYSIQNAQAAF |
| | | CFSETIPAPTGKDEAQQRSDVELLRFSLVLIQSWLGPLQFLSRVFTNSLVFGT |
| | | SDRVYEKLKDLEEGIQALMRELEDGSPRAGQILKQTYDKFDTNLRSDDALL |
| | | KNYGLLSCFKKDLHKAETYLRV MKCRRFVESSCAF |
| Dog | 429 | FPAMPLSSLFANAVLRAQHLHQLAADTYKEFERAYIPEGQRYSIQNAQAAF |
| | | CFSETIPAPTGKDEAQQRSDVELLRFSLLLIQSWLGPVQFLSRVFTNSLVFGT |
| | | SDRVYEKLKDLEEGIQALMRELEDGSPRAGQILKQTYDKFDTNLRSDDALL |
| | | KNYGLLSCFKKDLHKAETYLRV MKCRRFVESSCAF |
| Cat | 430 | FPAMPLSSLFANAVLRAQHLHQLAADTYKEFERAYIPEGQRYSIQNAQAAF |
| | | CFSETIPAPTGKDEAQQRSDVELLRFSLLLIQSWLGPVQFLSRVFTNSLVFGT |
| | | SDRVYEKLKDLEEGIQALMRELEDGSPRGGQILKQTYDKFDTNLRSDDALL |
| | | KNYGLLSCFKKDLHKAETYLRV MKCRRFVESSCAF |
| American | 431 | FPAMPLSSLFANAVLRAQHLHQLAADTYKDFERAYIPEGQRYSIQNAQAAF |
| mink | | CFSETIPAPTGKDEAQQRSDMELLRFSLLLIQSWLGPVQFLSRVFTNSLVFGT |
| | | SDRVYEKLKDLEEGIQALMRELEDGSPRAGPILKQTYDKFDTNLRSDDALL |
| | | KNYGLLSCFKKDLHKAETYLRV MKCRRFVESSCAF |
| Finback | 432 | FPAMPLSSLFANAVLRAQHLHQLAADTYKEFERAYIPEGQRYSIQNAQAAF |
| whale | | CFSETIPAPTGKDEAQQRSDVELLRFSLLLIQSWLGPVQFLSRVFTNSLVFGT |
| | | SDRVYEKLKDLEEGIQALMRELEDGSPRAGQILKQTYDKFDTNMRSDDAL |
| | | LKNYGLLSCFKKDLHKAETYLRV MKCRRFVESSCAF |
| Dolphin | 433 | FPAMPLSSLFANAVLRAQHLHQLAADTYKEFERAYIPEGQRYSIQNTQAAF |
| | | CFSETIPAPTGKDEAQQRSDVELLRFSLLLIQSWLGPVQFLSRVFTNSLVFGT |
| | | SDRVYEKLKDLEEGIQALMRELEDGSPRAGQILKQTYDKFDTNMRSDDAL |
| | | LKNYGLLSCFKKDLHKAETYLRV MKCRRFVESSCAF |
| Hippo | 434 | FPAMPLSSLFANAVLRAQHLHQLAADTYKEFERAYIPEGQRYSIQNTQAAF |
| | | CFSETIPAPTGKDEAQQRSDVELLRFSLLLIQSWLGPVQFLSRVFTNSLVFGT |
| | | SDRVYEKLKDLEEGIQALMRELEDGSPRAGQILKQTYDKFDTNMRSDDAL |
| | | LKNYGLLSCFKKDLHKAETYLRV MKCRRFVESSCAF |
| Rabbit | 435 | FPAMPLSSLFANAVLRAQHLHQLAADTYKEFERAYIPEGQRYSIQNAQAAF |
| | | CFSETIPAPTGKDEAQQRSDMELLRFSLLLIQSWLGPVQFLSRAFTNTLVFG |
| | | TSDRVYEKLKDLEEGIQALMRELEDGSPRVGQLLKQTYDKFDTNLRGDDA |
| | | LLKNYGLLSCFKKDLHKAETYLRV MKCRRFVESSCVF |
| Rat | 436 | FPAMPLSSLFANAVLRAQHLHQLAADTYKEFERAYIPEGQRYSIQNAQAAF |
| | | CFSETIPAPTGKEEAQQRTDMELLRFSLLLIQSWLGPVQFLSRIFTNSLMFGT |
| | | SDRVYEKLKDLEEGIQALMQELEDGSPRIGQILKQTYDKFDANMRSDDALL |
| | | KNYGLLSCFKKDLHKAETYLRV MKCRRFAESSCAF |
| Mouse | 437 | FPAMPLSSLFSNAVLRAQHLHQLAADTYKEFERAYIPEGQRYSIQNAQAAF |
| | | CFSETIPAPTGKEEAQQRTDMELLRFSLLLIQSWLGPVQFLSRIFTNSLMFGT |
| | | SDRVYEKLKDLEEGIQALMQELEDGSPRVGQILKQTYDKFDANMRSDDAL |
| | | LKNYGLLSCFKKDLHKAETYLRV MKCRRFVESSCAF |
| Hamster | 438 | FPAMPLSSLFANAVLRAQHLHQLAADTYKEFERAYIPEGQRYSIQNAQTAF |
| | | CFSETIPAPTGKEEAQQRSDMELLRFSLLLIQSWLGPVQFLSRIFTNSLMFGT |
| | | SDRVYEKLKDLEEGIQALMQELEDGSPRVGQILKQTYDKFDTNMRSDDAL |
| | | LKNYGLLSCFKKDLHKAETYLRV MKCRRFVESSCAF |
| Mole rat | 439 | FPAMPLSNLFANAVLRAQHLHQLAADTYKEFERAYIPEGQRYSIQNAQAAF |
| | | CFSETIPAPTGKEEAQQRSDMELLRFSLLLIQSWLGPVQFLSRVFTNSLVFGT |
| | | SDRVFEKLKDLEEGIQALMRELEDGSLRAGQLLKQTYDKFDTNMRSDDAL |
| | | LKNYGLLSCFKKDLHKAETYLRV MKCRRFVESSCAF |
| Guinea pig | 440 | FPAMPLSSLFGNAVLRAQHLHQLAADTYKEFERTYIPEGQRYSIHNTQTAF |
| | | CFSETIPAPTDKEEAQQRSDVELLHFSLLLIQSWLGPVQFLSRVFTNSLVFGT |
| | | SDRVYEKLKDLEEGIQALMRELEDGTPRAGQILKQTYDKFDTNLRSNDALL |
| | | KNYGLLSCFRKDLHRTETYLRV MKCRRFVESSCAF |
| Ox | 441 | AFPAMSLSGLFANAVLRAQHLHQLAADTFKEFERTYIPEGQRYSIQNTQVA |
| | | FCFSETIPAPTGKNEAQQKSDLELLRISLLLIQSWLGPLQFLSRVFTNSLVFGT |
| | | SDRVYEKLKDLEEGILALMRELEDGTPRAGQILKQTYDKFDTNMRSDDAL |
| | | LKNYGLLSCFRKDLHKTETYLRV MKCRRFGEASCAF |
| Sheep/Goat | 442 | AFPAMSLSGLFANAVLRAQHLHQLAADTFKEFERTYIPEGQRYSIQNTQVA |
| | | FCFSETIPAPTGKNEAQQKSDLELLRISLLLIQSWLGPLQFLSRVFTNSLVFGT |
| | | SDRVYEKLKDLEEGILALMRELEDVTPRAGQILKQTYDKFDTNMRSDDAL |
| | | LKNYGLLSCFRKDLHKTETYLRV MKCRRFGEASCAF |
| Red deer | 443 | FPAMSLSGLFANAVLRAQHLHQLAADTFKEFERTYIPEGQRYSIQNTQVAF |
| | | CFSETIPAPTGKNEAQQKSDLELLRISLLLIQSWLGPLQFLSRVFTNSLVFGTS |
| | | DRVYEKLKDLEEGILALMRELEDGTPRAGQILKQTYDKFDTNMRSDDALL |
| | | KNYGLLSCFRKDLHKTETYLRV MKCRRFGEASCAF |
| Giraffe | 444 | AFPAMSLSGLFANAVLRAQHLHQLAADTFKEFERTYIPEGQRYSIQNTQVA |
| | | FCFSETIPAPTGKNEAQQKSDLELLRISLLLIQSWLGPLQFLSRVFSNSLVFGT |
| | | SDRVYEKLKDLEEGILALMRELEDGTPRAGQILKQTYDKFDTNMRSDDAL |
| | | LKNYGLLSCFRKDLHKTETYLRV MKCRRFGEASCAF |
| Chevrotain- | 445 | FPAMSLSGLFANAVLRVQHLHQLAADTFKEFERTYIPEGQRYSIQNTQVAF |
| 1 | | CFSETIPAPTGKNEAQQKSDLELLRISLLLIQSWLGPLQFLSRVFTNSLVFGTS |
| | | DRVYEKLKDLEEGILALMRELEDGPPRAGQILKQTYDKFDTNMRSDDALL |
| | | KNYGLLSCFRKDLHKTETYLRV MKCRRFGEASCAF |
| Slow loris | 446 | FPAMPLSSLFANAVLRAQHLHQLAADTYKEFERAYIPEGQRYSIQNAQAAF |
| | | CFSETIPAPTGKDEAQQRSDMELLRFSLLLIQSWLGPVQLLSRVFTNSLVLG |
| | | TSDRVYEKLKDLEEGIQALMRELEDGSPRVGQILKQTYDKFDTNLRSDDAL |
| | | LKNYGLLSCFKKDLHKAETYLRV MKCRRFVESSCAF |
| Marmoset | 447 | FPTIPLSRLLDNAMLRAHRLHQLAFDTYQEFEEAYIPKEQKYSFLQNPQTSL |
| | | CFSESIPTPASKKETQQKSNLELLRMSLLLIQSWFEPVQFLRSVFANSLLYGV |
| | | SDSDVYEYLKDLEEGIQTLMGRLEDGSPRTGEIFMQTYRKFDVNSQNNDAL |
| | | LKNYGLLYCFRKDMDKVETFLRI VQCR-SVEGSCGF |
| BrTailed | 448 | FPAMPLSSLFANAVLRAQHLHQLVADTYKEFERTYIPEAQRHSIQSTQTAFC |
| Possum | | FSETIPAPTGKDEAQQRSDVELLRFSLLLIQSWLSPVQFLSRVFTNSLVFGTS |
| | | DRVYEKLRDLEEGIQALMQELEDGSSRGGLVLKTTYDKFDTNLRSDEALL |
| | | KNYGLLSCFKKDLHKAETYLRV MKCRRFVESSCAF |
| Monkey | 449 | FPTIPLSRLFDNAMLRAHRLHQLAFDTYQEFEEAYIPKEQKYSFLQNPQTSL |
| (rhesus) | | CFSESIPTPSNREETQQKSNLELLRISLLLIQSWLEPVQFLRSVFANSLVYGTS |
| | | YSDVYDLLKDLEEGIQTLMGRLEDGSSRTGQIFKQTYSKFDTNSHNNDALL |
| | | KNYGLLYCFRKDMDKIETFLRI VQCR-SVEGSCGF |

### Cytokines

[0264] The BP can be a cytokine. Cytokines encompassed by the inventive compositions can have utility in the treatment in various therapeutic or disease categories, including but not limited to cancer, rheumatoid arthritis, multiple sclerosis, myasthenia gravis, systemic lupus erythematosus, Alzheimer's disease, Schizophrenia, viral infections (e.g., chronic hepatitis C, AIDS), allergic asthma, retinal neurodegenerative processes, metabolic disorder, insulin resistance, and diabetic cardiomyopathy. Cytokines can be especially useful in treating inflammatory conditions and autoimmune conditions.

[0265] The BP can be one or more cytokines. The cytokines refer to proteins (e.g., chemokines, interferons, lymphokines, interleukins, and tumor necrosis factors) released by cells which can affect cell behavior. Cytokines can be produced by a broad range of cells, including immune cells such as macrophages, B lymphocytes, T lymphocytes and mast cells, as well as endothelial cells, fibroblasts, and various stromal cells. A given cytokine can be produced by more than one type of cell. Cytokines can be involved in producing systemic or local immunomodulatory effects.

[0266] Certain cytokines can function as pro-inflammatory cytokines. Pro-inflammatory cytokines refer to cytokines involved in inducing or amplifying an inflammatory reaction. Pro-inflammatory cytokines can work with various cells of the immune system, such as neutrophils and leukocytes, to generate an immune response. Certain cytokines can function as anti-inflammatory cytokines. Anti-inflammatory cytokines refer to cytokines involved in the reduction of an inflammatory reaction. Anti-inflammatory cytokines, in some cases, can regulate a pro-inflammatory cytokine response. Some cytokines can function as both pro- and anti-inflammatory cytokines.

[0267] Examples of cytokines that are regulatable by systems and compositions of the present disclosure include, but are not limited to lymphokines, monokines, and traditional polypeptide hormones except for human growth hormone. Included among the cytokines are parathyroid hormone; thyroxine; insulin; proinsulin; relaxin; prorelaxin; glycoprotein hormones such as follicle stimulating hormone (FSH), thyroid stimulating hormone (TSH), and luteinizing hormone (LH); hepatic growth factor; fibroblast growth factor; prolactin; placental lactogen; tumor necrosis factor-alpha; mullerian-inhibiting substance; mouse gonadotropin-associated peptide; inhibin; activin; vascular endothelial growth factor; integrin; thrombopoietin (TPO); nerve growth factors such as NGF-alpha; platelet-growth factor; transforming growth factors (TGFs) such as TGF-alpha, TGF-beta, TGF-beta1, TGF-beta2, and TGF-beta3; insulin-like growth factor-I and —II; erythropoietin (EPO); Flt-3L; stem cell factor (SCF); osteoinductive factors; interferons (IFNs) such as IFN-α, IFN-β, IFN-γ; colony stimulating factors (CSFs) such as macrophage-CSF (M-CSF); granulocyte-macrophage-CSF (GM-CSF); granulocyte-CSF (G-CSF); macrophage stimulating factor (MSP); interleukins (ILs) such as IL-1, IL-1a, IL-1b, IL-IRA, IL-18, IL-2, IL-3, IL-4, IL-5, IL-6, IL-7, IL-8, IL-9, IL-10, IL-11, IL-12, IL-12b, IL-13, IL-14, IL-15, IL-16, IL-17, IL-20; a tumor necrosis factor such as CD154, LT-beta, TNF-alpha, TNF-beta, 4-1BBL, APRIL, CD70, CD153, CD178, GITRL, LIGHT, OX40L, TALL-1, TRAIL, TWEAK, TRANCE; and other polypeptide factors including LIF, oncostatin M (OSM) and kit ligand (KL). Cytokine receptors refer to the receptor proteins which bind cytokines. Cytokine receptors may be both membrane-bound and soluble.

[0268] The target polynucleotide can encode for a cytokine. Non-limiting examples of cytokines include 4-1BBL, activin βA, activin βB, activin βC, activin 13E, artemin (ARTN), BAFF/BLyS/TNFSF138, BMP10, BMP15, BMP2, BMP3, BMP4, BMP5, BMP6, BMP7, BMP8a, BMP8b, bone morphogenetic protein 1 (BMP1), CCL1/TCA3, CCL11, CCL12/MCP-5, CCL13/MCP-4, CCL14, CCL15, CCL16, CCL17/TARC, CCL18, CCL19, CCL2/MCP-1, CCL20, CCL21, CCL22/MDC, CCL23, CCL24, CCL25, CCL26, CCL27, CCL28, CCL3, CCL3L3, CCL4, CCL4L1/LAG-1, CCL5, CCL6, CCL7, CCL8, CCL9, CD153/CD30L/TNFSF8, CD40L/CD154/TNFSF5, CD40LG, CD70, CD70/CD27L/TNFSF7, CLCF1, c-MPL/CD110/TPOR, CNTF, CX3CL1, CXCL1, CXCL10, CXCL11, CXCL12, CXCL13, CXCL14, CXCL15, CXCL16, CXCL17, CXCL2/MIP-2, CXCL3, CXCL4, CXCL5, CXCL6, CXCL7/Ppbp, CXCL9, EDA-A1, FAM19A1, FAM19A2, FAM19A3, FAM19A4, FAM19A5, Fas Ligand/FASLG/CD95L/CD178, GDF10, GDF11, GDF15, GDF2, GDF3, GDF4, GDF5, GDF6, GDF7, GDF8, GDF9, glial cell line-derived neurotrophic factor (GDNF), growth differentiation factor 1 (GDF1), IFNA1, IFNA10, IFNA13, IFNA14, IFNA2, IFNA4, IFNA5/IFNaG, IFNA7, IFNA8, IFNB1, IFNE, IFNG, IFNZ, IFNω/IFNW1, IL11, IL18, IL18BP, ILIA, IL1B, IL1F10, IL1F3/IL1RA, IL1F5, IL1F6, IL1F7, IL1F8, IL1F9, IL1RL2, IL31, IL33, IL6, IL8/CXCL8, inhibin-A, inhibin-B, Leptin, LIF, LTA/TNFB/TNFSF1, LTB/TNFC, neurturin (NRTN), OSM, OX-40L/TNFSF4/CD252, persephin (PSPN), RANKL/OPGL/TNFSF11(CD254), TL1A/TNFSF15, TNFA, TNF-alpha/TNFA, TNFSF10/TRAIL/APO-2L(CD253), TNFSF12, TNFSF13, TNFSF14/LIGHT/CD258, XCL1, and XCL2. In some embodiments, the target gene encodes for an immune checkpoint inhibitor. Non-limiting examples of such immune checkpoint inhibitors include PD-1, CTLA-4, LAG3, TIM-3, A2AR, B7-H3, B7-H4, BTLA, IDO, KIR, and VISTA. In some embodiments, the target gene encodes for a T cell receptor (TCR) alpha, beta, gamma, and/or delta chain.

[0269] In some cases, the cytokine can be a chemokine. The chemokine can be selected from a group including, but not limited to, ARMCX2, BCA-1/CXCL13, CCL11, CCL12/MCP-5, CCL13/MCP-4, CCL15/MIP-5/MIP-1 delta, CCL16/HCC-4/NCC4, CCL17/TARC, CCL18/PARC/MIP-4, CCL19/MIP-3b, CCL2/MCP-1, CCL20/MIP-3 alpha/MIP3A, CCL21/6Ckine, CCL22/MDC, CCL23/MIP 3, CCL24/Eotaxin-2/MPIF-2, CCL25/TECK, CCL26/Eotaxin-3, CCL27/CTACK, CCL28, CCL3/Mip1a, CCL4/MIP1B, CCL4L1/LAG-1, CCL5/RANTES, CCL6/C10, CCL8/MCP-2, CCL9, CML5, CXCL1, CXCL10/Crg-2, CXCL12/SDF-1 beta, CXCL14/BRAK, CXCL15/Lungkine, CXCL16/SR-PSOX, CXCL17, CXCL2/MIP-2, CXCL3/GRO gamma, CXCL4/PF4, CXCL5, CXCL6/GCP-2, CXCL9/MIG, FAM19A1, FAM19A2, FAM19A3, FAM19A4/TAFA4, FAM19A5, Fractalkine/CX3CL1, I-309/CCL1/TCA-3, IL-8/CXCL8, MCP-3/CCL7, NAP-2/PPBP/CXCL7, XCL2, and IL10.

[0270] Table 3g provides a non-limiting list of such sequences of BPs that are encompassed by the compositions of this disclosure. In some embodiments of the compositions disclosed herein, where the biologically active moiety can be a biologically active peptide (BP), the BP can comprise a peptide sequence that exhibits at least (about) 80% sequence identity (e.g., at least (about) 81%, at least (about) 82%, at least (about) 83%, at least (about) 84%, at least (about) 85%, at least (about) 86%, at least (about) 87%, at least (about) 88%, at least (about) 89%, at least (about) 90%, at least (about) 91%, at least (about) 92%, at least (about) 93%, at least (about) 94%, at least (about) 95%, at least (about) 96%, at least (about) 97%, at least (about) 98%, at least (about) 99%, or 100% sequence identity) to an amino acid sequence of a cytokine set forth in Table 3g.

TABLE 3g
Cytokines for Conjugation

| Name of | | |
|---|---|---|
| Protein | SEQ ID | |
| (Synonym) | NO: | Amino Acid Sequence |
| Anti-CD3 | | See U.S. Pat. Nos. 5,885,573 and 6,491,916 |
| IL-1ra, human | 450 | MEICRGLRSHLITLLLFLFHSETICRPSGRKSSKMQAFRIWDVNQKTFYLR |
| full length | | NNQLVAGYLQGPNVNLEEKIDVVPIEPHALFLGIHGGKMCLSCVKSGDE |
| | | TRLQLEAVNITDLSENRKQDKRFAFIRSDSGPTTSFESAACPGWFLCTAM |
| | | EADQPVSLTNMPDEGVMVTKFYFQEDE |
| IL-1ra, Dog | 451 | METCRCPLSYLISFLLFLPHSETACRLGKRPCRMQAFRIWDVNQKTFYLR |
| | | NNQLVAGYLQGSNTKLEEKLDVVPVEPHAVFLGIHGGKLCLACVKSGD |
| | | ETRLQLEAVNITDLSKNKDQDKRFTFILSDSGPTTSFESAACPGWFLCTAL |
| | | EADRPVSLTNRPEEAMMVTKFYFQKE |
| IL-1ra, Rabbit | 452 | MRPSRSTRRHLISLLLFLFHSETACRPSGKRPCRMQAFRIWDVNQKTFYL |
| | | RNNQLVAGYLQGPNAKLEERIDVVPLEPQLLFLGIQRGKLCLSCVKSGD |
| | | KMKLHLEAVNITDLGKNKEQDKRFTFIRSNSGPTTTFESASCPGWFLCTA |
| | | LEADQPVSLTNTPDDSIVVTKFYFQED |
| IL-1ra, Rat | 453 | MEICRGPYSHLISLLLILLFRSESAGHIPAGKRPCKMQAFRIWDTNQKTFY |
| | | LRNNQLIAGYLQGPNTKLEEKIDMVPIDFRNVFLGIHGGKLCLSCVKSGD |
| | | DTKLQLEEVNITDLNKNKEEDKRFTFIRSETGPTTSFESLACPGWFLCTTL |
| | | EADHPVSLTNTPKEPCTVTKFYFQED |
| IL-1ra, Mouse | 454 | MEICWGPYSHLISLLLILLFHSEAACRPSGKRPCKMQAFRIWDTNQKTFY |
| | | LRNNQLIAGYLQGPNIKLEEKIDMVPIDLHSVFLGIHGGKLCLSCAKSGD |
| | | DIKLQLEEVNITDLSKNKEEDKRFTFIRSEKGPTTSFESAACPGWFLCTTL |
| | | EADRPVSLTNTPEEPLIVTKFYFQEDQ |
| Anakinra | 455 | MRPSGRKSSKMQAFRIWDVNQKTFYLRNNQLVAGYLQGPNVNLEEKID |
| | | VVPIEPHALFLGIHGGKMCLSCVKSGDETRLQLEAVNITDLSENRKQDKR |
| | | FAFIRSDSGPTTSFESAACPGWFLCTAMEADQPVSLTNMPDEGVMVTKF |
| | | YFQEDE |
| IL-10 | 456 | MHSSALLCCLVLLTGVRASPGQGTQSENSCTHFPGNLPNMLRDLRDAFS |
| | | RVKTFFQMKDQLDNLLLKESLLEDFKGYLGCQALSEMIQFYLEEVMPQA |
| | | ENQDPDIKAHVNSLGENLKTLRLRLRRCHRFLPCENKSKAVEQVKNAFN |
| | | KLQEKGIYKAMSEFDIFINYIEAYMTMKIRN |

[0271] “IL-1ra” means the human IL-1 receptor antagonist protein and species and sequence variants thereof, including the sequence variant anakinra (Kineret®), having at least a portion of the biological activity of mature IL-1ra. Human IL-1ra is a mature glycoprotein of 152 amino acid residues. The inhibitory action of IL-1ra results from its binding to the type I IL-1 receptor. The protein has a native molecular weight of 25 kDa, and the molecule shows limited sequence homology to IL-1α (19%) and IL-1β (26%). Anakinra is a nonglycosylated, recombinant human IL-1ra and differs from endogenous human IL-1ra by the addition of an N-terminal methionine. A commercialized version of anakinra is marketed as Kineret®. It binds with the same avidity to IL-1 receptor as native IL-1ra and IL-1b, but does not result in receptor activation (signal transduction), an effect attributed to the presence of only one receptor binding motif on IL-1ra versus two such motifs on IL-1α and IL-1β. Anakinra has 153 amino acids and 17.3 kD in size, and has a reported half-life of approximately 4-6 hours.

[0272] Increased IL-1 production has been reported in patients with various viral, bacterial, fungal, and parasitic infections; intravascular coagulation; high-dose IL-2 therapy; solid tumors; leukemias; Alzheimer's disease; HIV-1 infection; autoimmune disorders; trauma (surgery); hemodialysis; ischemic diseases (myocardial infarction); noninfectious hepatitis; asthma; UV radiation; closed head injury; pancreatitis; peritonitis; graft-versus-host disease; transplant rejection; and in healthy subjects after strenuous exercise. There is an association of increased IL-1b production in patients with Alzheimer's disease and a possible role for IL 1 in the release of the amyloid precursor protein. IL-1 has also been associated with diseases such as type 2 diabetes, obesity, hyperglycemia, hyperinsulinemia, type 1 diabetes, insulin resistance, retinal neurodegenerative processes, disease states and conditions characterized by insulin resistance, acute myocardial infarction (AMI), acute coronary syndrome (ACS), atherosclerosis, chronic inflammatory disorders, rheumatoid arthritis, degenerative intervertebral disc disease, sarcoidosis, Crohn's disease, ulcerative colitis, gestational diabetes, excessive appetite, insufficient satiety, metabolic disorders, glucagonomas, secretory disorders of the airway, osteoporosis, central nervous system disease, restenosis, neurodegenerative disease, renal failure, congestive heart failure, nephrotic syndrome, cirrhosis, pulmonary edema, hypertension, disorders wherein the reduction of food intake is desired, irritable bowel syndrome, myocardial infarction, stroke, post-surgical catabolic changes, hibernating myocardium, diabetic cardiomyopathy, insufficient urinary sodium excretion, excessive urinary potassium concentration, conditions or disorders associated with toxic hypervolemia, polycystic ovary syndrome, respiratory distress, chronic skin ulcers, nephropathy, left ventricular systolic dysfunction, gastrointestinal diarrhea, postoperative dumping syndrome, irritable bowel syndrome, critical illness polyneuropathy (CIPN), systemic inflammatory response syndrome (SIRS), dyslipidemia, reperfusion injury following ischemia, and coronary heart disease risk factor (CHDRF) syndrome. IL-1ra-containing fusion proteins of the invention may find particular use in the treatment of any of the foregoing diseases and disorders. IL-1ra has been cloned, as described in U.S. Pat. Nos. 5,075,222 and 6,858,409.

[0273] In some cases, the BP can be IL-10. IL-10 can be an effective anti-inflammatory cytokine that represses the production of the proinflammatory cytokines and chemokines. IL-10 is the one of the major TH2-type cytokine that increases humoral immune responses and lowers cell-mediated immune reactions. IL-10 can be useful for the treatment of autoimmune diseases and inflammatory diseases such as rheumatoid arthritis, multiple sclerosis, myasthenia gravis, systemic lupus erythematosus, Alzheimer's, Schizophrenia, allergic asthma, retinal neurodegenerative processes, and diabetes.

[0274] In some cases, IL-10 can be modified to improve stability and decrease prolytic degradation. The modification can be one or more amide bond substitution. In some cases, one or more amide bonds within backbone of IL-10 can be substituted to achieve the abovementioned effects. The one or more amide linkages (—CONH—) in IL-10 can be replaced with a linkage which is an isostere of an amide linkage, such as —CH₂NH—, —CH₂S—, —CH₂CH₂—, —CH═CH— (cis and trans), —COCH₂—, —CH(OH)CH₂— or —CH₂SO—. Furthermore, the amide linkages in IL-10 can also be replaced by a reduced isostere pseudopeptide bond. See Couder et al. (1993) Int. J. Peptide Protein Res. 41:181-184, which is hereby incorporated by reference in its entirety.

[0275] The one or more acidic amino acids, including aspartic acid, glutamic acid, homoglutamic acid, tyrosine, alkyl, aryl, arylalkyl, and heteroaryl sulfonamides of 2,4-diaminopriopionic acid, ornithine or lysine and tetrazole-substituted alkyl amino acids; and side chain amide residues such as asparagine, glutamine, and alkyl or aromatic substituted derivatives of asparagine or glutamine; as well as hydroxyl-containing amino acids, including serine, threonine, homoserine, 2,3-diaminopropionic acid, and alkyl or aromatic substituted derivatives of serine or threonine can be substituted.

[0276] The one or more hydrophobic amino acids in IL-10 such as alanine, leucine, isoleucine, valine, norleucine, (S)-2-aminobutyric acid, (5)-cyclohexylalanine or other simple alpha-amino acids can be substituted with amino acids including, but not limited to, an aliphatic side chain from C1-C10 carbons including branched, cyclic and straight chain alkyl, alkenyl or alkynyl substitutions

[0277] In some cases, the one or more hydrophobic amino acids in IL-10 such as can be substituted substitution of aromatic-substituted hydrophobic amino acids, including phenylalanine, tryptophan, tyrosine, sulfotyrosine, biphenylalanine, 1-naphthylalanine, 2-naphthylalanine, 2-benzothienylalanine, 3-benzothienylalanine, histidine, including amino, alkylamino, dialkylamino, aza, halogenated (fluoro, chloro, bromo, or iodo) or alkoxy (from C₁-C₄)-substituted forms of the above-listed aromatic amino acids, illustrative examples of which are: 2-, 3- or 4-aminophenylalanine, 2-, 3- or 4-chlorophenylalanine, 2-, 3- or 4-methylphenylalanine, 2-, 3- or 4-methoxyphenylalanine, 5-amino-, 5-chloro-, 5-methyl- or 5-methoxytryptophan, 2′-, 3′-, or 4′-amino-, 2′-, 3′-, or 4′-chloro-, 2, 3, or 4-biphenylalanine, 2′-, 3′-, or 4′-methyl-, 2-, 3- or 4-biphenylalanine, and 2- or 3-pyridylalanine;

[0278] The one or more hydrophobic amino acids in IL-10 such as phenylalanine, tryptophan, tyrosine, sulfotyrosine, biphenylalanine, 1-naphthylalanine, 2-naphthylalanine, 2-benzothienylalanine, 3-benzothienylalanine, histidine, including amino, alkylamino, dialkylamino, aza, halogenated (fluoro, chloro, bromo, or iodo) or alkox can be substituted by aromatic amino acids including: 2-, 3- or 4-aminophenylalanine, 2-, 3- or 4-chlorophenylalanine, 2-, 3- or 4-methylphenylalanine, 2-, 3- or 4-methoxyphenylalanine, 5-amino-, 5-chloro-, 5-methyl- or 5-methoxytryptophan, 2′-, 3′-, or 4′-amino-, 2′-, 3′-, or 4′-chloro-, 2, 3, or 4-biphenylalanine, 2′-, 3′-, or 4′-methyl-, 2-, 3- or 4-biphenylalanine, and 2- or 3-pyridylalanine

[0279] The amino acids comprising basic side chains, including arginine, lysine, histidine, ornithine, 2,3-diaminopropionic acid, homoarginine, including alkyl, alkenyl, or aryl-substituted derivatives of the previous amino acids, can be substituted. Examples are N-epsilon-isopropyl-lysine, 3-(4-tetrahydropyridyl)-glycine, 3-(4-tetrahydropyridyl)-alanine, N,N-gamma, gamma′-diethyl-homoarginine, alpha-methyl-arginine, alpha-methyl-2,3-diaminopropionic acid, alpha-methyl-histidine, and alpha-methyl-ornithine where the alkyl group occupies the pro-R position of the alpha-carbon. The modified IL-10 can comprise amides formed from any combination of alkyl, aromatic, heteroaromatic, ornithine, or 2,3-diaminopropionic acid, carboxylic acids or any of the many well-known activated derivatives such as acid chlorides, active esters, active azolides and related derivatives, lysine, and ornithine.

[0280] In some cases, IL-10 comprises can comprise one or more naturally occurring L-amino acids, synthetic L-amino acids, and/or D-enantiomers of an amino acid. The IL-10 polypeptide can comprise one or more of the following amino acids: ω-aminodecanoic acid, ω-aminotetradecanoic acid, cyclohexylalanine, α,γ-diaminobutyric acid, α,β-diaminopropionic acid, δ-amino valeric acid, t-butylalanine, t-butylglycine, N-methylisoleucine, phenylglycine, cyclohexylalanine, norleucine, naphthylalanine, ornithine, citrulline, 4-chlorophenylalanine, 2-fluorophenylalanine, pyridylalanine 3-benzothienyl alanine, hydroxyproline, β-alanine, o-aminobenzoic acid, m-aminobenzoic acid, p-aminobenzoic acid, m-aminomethylbenzoic acid, 2,3-diaminopropionic acid, α-aminoisobutyric acid, N-methylglycine(sarcosine), 3-fluorophenylalanine, 4-fluorophenylalanine, penicillamine, 1,2,3,4-tetrahydroisoquinoline-3-carboxylic acid, β-2-thienylalanine, methionine sulfoxide, homoarginine, N-acetyl lysine, 2,4-diamino butyric acid, rho-aminophenylalanine, N-methylvaline, homocysteine, homoserine, ε-amino hexanoic acid, ω-aminohexanoic acid, ω-aminoheptanoic acid, ω-aminooctanoic acid, and 2,3-diaminobutyric acid.

[0281] IL-10 can comprise a cysteine residue or a cysteine which can act as linker to another peptide via a disulfide linkage or to provide for cyclization of the IL-10 polypeptide. Methods of introducing a cysteine or cysteine analog are known in the art; see, e.g., U.S. Pat. No. 8,067,532. An IL-10 polypeptide can be cyclized. Other means of cyclization include introduction of an oxime linker or a lanthionine linker; see, e.g., U.S. Pat. No. 8,044,175. Any combination of amino acids (or non-amino acid moieties) that can form a cyclizing bond can be used and/or introduced. A cyclizing bond can be generated with any combination of amino acids (or with an amino acid and —(CH₂)ₙCO— or —(CH₂)ₙC₆H₄—CO—) with functional groups which allow for the introduction of a bridge. Some examples are disulfides, disulfide mimetics such as the —(CH₂)ₙ-carba bridge, thioacetal, thioether bridges (cystathionine or lanthionine) and bridges containing esters and ethers.

[0282] The IL-10 can be substituted with an N-alkyl, aryl, or backbone crosslinking to construct lactams and other cyclic structures, C-terminal hydroxymethyl derivatives, o-modified derivatives, N-terminally modified derivatives including substituted amides such as alkylamides and hydrazides. In some cases, an IL-10 polypeptide is a retroinverso analog.

[0283] IL-10 can be IL-10 can be native protein, peptide fragment IL-10, or modified peptide, having at least a portion of the biological activity of native IL-10. IL-10 can be modified to improve intracellular uptake. One such modification can be attachment of a protein transduction domain. The protein transduction domain can be attached to the C-terminus of the IL-10. Alternatively, the protein transduction domain can be attached to the N-terminus of the IL-10. The protein transduction domain can be attached to IL-10 via covalent bond. The protein transduction domain can be chosen from any of the sequences listed in Table 3h.

TABLE 3h
Exemplary protein transduction domains

| SEQ ID NO: | Amino Acid Sequence |
|---|---|
| 457 | YGRKKRRQRRR |
| 458 | RRQRRTSKLMKR |
| 459 | GWTLNSAGYLLGKINLKALAALAKKIL |
| 460 | KALAWEAKLAKALAKALAKHLAKALAKALKCEA |
| 461 | RQIKIWFQNRRMKWKK |
| 462 | YGRKKRRQRRR |
| 463 | RKKRRQRRR |
| 464 | YGRKKRRQRRR |
| 465 | RKKRRQRR |
| 466 | YARAAARQARA |
| 467 | THRLPRRRRRR |
| 468 | GGRRARRRRRR |

[0284] The BP of the subject compositions are not limited to native, full-length polypeptides, but also include recombinant versions as well as biologically and/or pharmacologically active variants or fragments thereof. For example, it will be appreciated that various amino acid substitutions can be made in the GP to create variants without departing from the spirit of the invention with respect to the biological activity or pharmacologic properties of the BP. Examples of conservative substitutions for amino acids in polypeptide sequences are shown in Table 4. However, in embodiments of the compositions of this disclosure in which the sequence identity of the BP is less than 100% compared to a specific sequence disclosed herein, the invention contemplates substitution of any of the other 19 natural L-amino acids for a given amino acid residue of the given BP, which may be at any position within the sequence of the BP, including adjacent amino acid residues. If any one substitution results in an undesirable change in biological activity, then one of the alternative amino acids can be employed and the construct evaluated by the methods described herein, or using any of the techniques and guidelines for conservative and non-conservative mutations set forth, for instance, in U.S. Pat. No. 5,364,934, the contents of which is incorporated by reference in its entirety, or using methods generally known to those of skill in the art. In addition, variants can also include, for instance, polypeptides wherein one or more amino acid residues are added or deleted at the N- or C-terminus of the full-length native amino acid sequence of a BP that retains at least a portion of the biological activity of the native peptide.

TABLE 4
Exemplary conservative amino acid substitutions

| Original Residue | Exemplary Substitutions |
|---|---|
| Ala (A) | val; leu; ile |
| Arg (R) | lys; gln; asn |
| Asn (N) | gln; his; Iys; arg |
| Asp (D) | glu |
| Cys (C) | ser |
| Gln (Q) | asn |
| Glu (E) | asp |
| Gly (G) | pro |
| His (H) | asn: gln: Iys: arg |
| xIle (I) | leu; val; met; ala; phe: norleucine |
| Leu (L) | norleucine: ile: val; met; ala: phe |
| Lys (K) | arg: gln: asn |
| Met (M) | leu; phe; ile |
| Phe (F) | leu: val: ile; ala |
| Pro (P) | gly |
| Ser (S) | thr |
| Thr (T) | ser |
| Trp (W) | tyr |
| Tyr(Y) | trp: phe: thr: ser |
| Val (V) | ile; leu; met; phe; ala; norleucine |

[0285] In some embodiments, a BP incorporated into a composition of this disclosure can have a sequence that exhibits at least (about) 80% (or at least (about) 81%, or at least (about) 82%, or at least (about) 83%, or at least (about) 84%, or at least (about) 85%, or at least (about) 86%, or at least (about) 87%, or at least (about) 88%, or at least (about) 89%, or at least (about) 90%, or at least (about) 91%, or at least (about) 92%, or at least (about) 93%, or at least (about) 94%, or at least (about) 95%, or at least (about) 96%, or at least (about) 97%, or at least (about) 98%, or at least (about) 99%, or (about) 100% sequence identity to a sequence from Tables 3a-3h. In some embodiments of the compositions of this disclosure, the sequence of the BP can comprise one or more substitutions shown in Table 4.

### Antibodies:

[0286] In some embodiments of the compositions of this disclosure, the biologically active peptide (BP) can comprise an antibody, such as a monospecific, bispecific, or multispecific antibody. The antibody can comprise a binding domain (or binding moiety) having specific binding affinity to a tumor-specific marker or an antigen of a target cell (or a target cell antigen) (such as one described more fully hereinbelow). The antibody can comprise a binding domain (or binding moiety) that binds to an effector cell antigen (such as one described more fully hereinbelow). In some embodiments of the compositions of this disclosure, the antibody, such as a bispecific or multi-specific antibody, can comprise (1) a binding domain (e.g., a first or second binding domain) having specific binding affinity to a tumor-specific marker or a target cell antigen (such as one described more fully hereinbelow) and (2) another binding domain (e.g., a second or first binding domain) that binds to an effector cell antigen (such as one described more fully hereinbelow). The disclosure contemplates use of single chain binding domains, such as but not limited to Fv, Fab, Fab′, Fab′-SH, nanobodies (also known as single domain antibodies or V_{HH}), F(ab′)2, linear antibodies, single domain antibody, single domain camelid antibody, single-chain antibody molecules (scFv), multispecific antibodies formed from antibody fragments, and diabodies capable of binding ligands or receptors associated with effector cells and antigens of diseased tissues or cells (such as cancers, tumors, or other malignant tissues). The binding domain (or the first binding domain, or the second binding domain) can be a non-antibody scaffold selected from anticalins, adnectins, fynomers, affilins, affibodies, centyrins, DARPins. The binding domain (or the first binding domain, or the second binding domain) for a tumor cell target can be a variable domain of a T cell receptor engineered to bind major histocompatibility complex (MHC) that is loaded with a peptide fragment of a protein that is overexpressed by tumor cells. In some embodiments of the compositions of this disclosure (such as XTENylated Protease-Activated T Cell Engagers (“XPAT” or “XPATs”), other masked therapeutic antibodies, etc.) the biologically active peptide (BP) can be a bispecific antibody (e.g., a bispecific T-cell engager).

[0287] With respect to single chain binding domains (or binding moieties), as is well established, an active antibody fragment (Fv) is the minimum antibody fragment which contains a complete antigen recognition and binding site; consisting of a dimer of one heavy (VH) and one light chain variable domain (VL) in non-covalent association. Each scFv can comprise one VL and one VH. Within each VH and VL chain are three complementarity determining regions (CDRs) that interact to define an antigen binding site on the surface of the VH-VL dimer; the six CDRs of a binding domain (or binding moiety) confer antigen binding specificity to the antibody or single chain binding domain (or binding moiety). In some cases, scFv are created in which each has 3, 4, or 5 CHRs within each binding domain (or binding moiety). Framework sequences flanking the CDRs have a tertiary structure that is essentially conserved in native immunoglobulins across species, and the framework residues (FR) serve to hold the CDRs in their appropriate orientation. The constant domains are not required for binding function, but may aid in stabilizing VH-VL interaction. In some embodiments, the domain of the binding site of the polypeptide can be a pair of VH-VL, VH-VH or VL-VL domains either of the same or of different immunoglobulins, however it is generally preferred to make single chain binding domains (or binding moieties) using the respective VH and VL chains from the parental antibody. The order of VH and VL domains within the polypeptide chain is not limiting for the present invention; the order of domains given may be reversed usually without any loss of function, but it is understood that the VH and VL domains are arranged so that the antigen binding site can properly fold. Thus, the single chain binding domains of the bispecific scFv embodiments of the subject compositions can be in the order (VL-VH)1-(VL-VH)2, wherein “1” and “2” represent the first and second binding domains (or the first and second binding moieties), respectively, or (VL-VH)1-(VH-VL)2, or (VH-VL)1-(VL-VH)2, or (VH-VL)1-(VH-VL)2, wherein the paired binding domains (or binding moieties) are linked by a polypeptide linker as described hereinbelow.

[0288] In some embodiments of the compositions, wherein the BP comprises (1) a binding domain (or binding moiety) having specific binding affinity to a tumor-specific marker or an antigen of a target cell (or a target cell antigen) and (2) a binding domain (or binding moiety) that binds to an effector cell antigen, the arrangement of the binding domains (or binding moieties) in an exemplary bispecific single chain antibody disclosed herein may therefore be one in which the first binding domain (or first binding moiety) can be located C-terminally to the second binding domain (or second binding moiety). The arrangement of the V chains can be VH (target cell surface antigen)-VL (target cell surface antigen)-VL (effector cell antigen)-VH (effector cell antigen), VH (target cell surface antigen)-VL (target cell surface antigen)-VH (effector cell antigen)-VL (effector cell antigen), VL (target cell surface antigen)-VH (target cell surface antigen)-VL (effector cell antigen)-VH (effector cell antigen) or VL (target cell surface antigen)-VH (target cell surface antigen)-VH (effector cell antigen)-VL (effector cell antigen). For an arrangement, in which the second binding domain (or second binding moiety) can be located N-terminally to the first binding domain (or first binding moiety), the following orders are possible: VH (effector cell antigen)-VL (effector cell antigen)-VL (target cell surface antigen)-VH (target cell surface antigen), VH (effector cell antigen)-VL (effector cell antigen)-VH (target cell surface antigen)-VL (target cell surface antigen), VL (effector cell antigen)-VH (effector cell antigen)-VL (target cell surface antigen)-VH (target cell surface antigen) or VL (effector cell antigen)-VH (effector cell antigen)-VH (target cell surface antigen)-VL (target cell surface antigen). As used herein, “N-terminally to” or “C-terminally to” and grammatical variants thereof denote relative location within the primary amino acid sequence rather than placement at the absolute N- or C-terminus of the bispecific single chain antibody. Hence, as a non-limiting example, a first binding domain (or first binding moiety) which is “located C-terminally to the second binding domain” denotes that the first binding is located on the carboxyl side of the second binding domain (or second binding moiety) within the bispecific single chain antibody, and does not exclude the possibility that an additional sequence, for example a His-tag, or another compound such as a radioisotope, is located at the C-terminus of the bispecific single chain antibody.

[0289] The VL and VH domains can be derived from monoclonal antibodies with binding specificity to the tumor-specific marker or the antigen of the target cell and effector cell antigens, respectively. In other cases, the first and second binding domains (or the first and second binding moieties) each comprise six CDRs derived from monoclonal antibodies with binding specificity to a target cell marker, such as a tumor-specific marker and effector cell antigens, respectively. In other embodiments, the first and second binding domains (or the first and second binding moieties) of the subject compositions can have 3, 4, or 5 CHRs within each binding domain (or each binding moiety). In other embodiments, the embodiments of the invention comprise a first binding domain and a second binding domain wherein each comprises a CDR-H1 region, a CDR-H2 region, a CDR-H3 region, a CDR-L1 region, a CDR-L2 region, and a CDR-H3 region, where each of the regions can be derived from a monoclonal antibody capable of binding the tumor-specific marker or the antigen of the target cell, and effector cell antigens, respectively.

[0290] In some embodiments, where the BP comprises a binding domain (or binding moiety) (or a first binding domain, or a second binding domain) having binding affinity for an effector cell antigen, the effector cell antigen can be expressed on the surface of an effector cell selected from a plasma cell, a T cell, a B cell, a cytokine induced killer cell (CIK cell), a mast cell, a dendritic cell, a regulatory T cell (RegT cell), a helper T cell, a myeloid cell, and a NK cell. The effector cell antigen can be expressed on or within an effector cell. The effector cell antigen can be expressed on a T cell, such as a CD4+, CD8+, or natural killer (NK) cell. The effector cell antigen can be expressed on the surface of a T cell. The effector cell antigen can be expressed on a B cell, master cell, dendritic cell, or myeloid cell.

[0291] In some embodiments of the compositions herein, the BP can comprise a binding domain (or binding moiety) (or a first binding domain, or a second binding domain) having specific binding affinity to a tumor-specific marker or an antigen of a target cell (or a target cell antigen). The tumor-specific marker or the target cell antigen can be associated with a tumor cell. The tumor cell can be of a tumor, such as stroma cell tumor, fibroblast tumor, myofibroblast tumor, glial cell tumor, epithelial cell tumor, fat cell tumor, immune cell tumor, vascular cell tumor, or smooth muscle cell tumor. The tumor-specific marker or the antigen of the target cell can be selected from the group consisting of alpha 4 integrin, Ang2, B7-H3, B7-H6 (e.g., its natural ligand Nkp30 rather than an antibody fragment), CEACAM5, cMET, CTLA4, FOLR1, EpCAM, CCR5, CD19, HER2, HER2 neu, HER3, HER4, HER1 (EGFR), PD-L1, PSMA, CEA, TROP-2, MUC1(mucin), MUC-2, MUC3, MUC4, MUC5AC, MUC5B, MUC7, MUC16 βhCG, Lewis-Y, CD20, CD33, CD38, CD30, CD56 (NCAM), CD133, ganglioside GD3; 9-O-Acetyl-GD3, GM2, Globo H, fucosyl GM1, GD2, carbonicanhydrase IX, CD44v6, Nectin-4, Sonic Hedgehog (Shh), Wue-1, plasma cell antigen 1, melanoma chondroitin sulfate proteoglycan (MCSP), CCR8, 6-transmembrane epithelial antigen of prostate (STEAP), mesothelin, A33 antigen, prostate stem cell antigen (PSCA), Ly-6, desmoglein 4, fetal acetylcholine receptor (fnAChR), CD25, cancer antigen 19-9 (CA19-9), cancer antigen 125 (CA-125), Muellerian inhibitory substance receptor type II (MISIIR), sialylated Tn antigen (s TN), fibroblast activation antigen (FAP), endosialin (CD248), epidermal growth factor receptor variant III (EGFRvIII), tumor-associated antigen L6 (TAL6), SAS, CD63, TAG72, Thomsen-Friedenreich antigen (TF-antigen), insulin-like growth factor I receptor (IGF-IR), Cora antigen, CD7, CD22, CD70 (e.g., its natural ligand, CD27 rather than an antibody fragment), CD79a, CD79b, G250, MT-MMPs, CA19-9, CA-125, alpha-fetoprotein (AFP), VEGFR1, VEGFR2, DLK1, SP17, ROR1, and EphA2. The tumor-specific marker or the antigen of the target cell can be selected from the group consisting of alpha 4 integrin, Ang2, B7-H3, B7-H6 (e.g., its natural ligand Nkp30 rather than an antibody fragment), CEACAM5, cMET, CTLA4, FOLR1, EpCAM (epithelial cell adhesion molecule), CCR5, CD19, HER2, HER2 neu, HER3, HER4, HER1 (EGFR), PD-L1, PSMA, CEA, TROP-2, MUC1(mucin), MUC-2, MUC3, MUC4, MUC5AC, MUC5B, MUC7, MUC16, βhCG, Lewis-Y, CD20, CD33, CD38, CD30, CD56 (NCAM), CD133, ganglioside GD3, 9-O-acetyl-GD3, GM2, Globo H, fucosyl GM1, GD2, carbonicanhydrase IX, CD44v6, Nectin-4, Sonic Hedgehog (Shh), Wue-1, plasma cell antigen 1 (PC-1), melanoma chondroitin sulfate proteoglycan (MCSP), CCR8, 6-transmembrane epithelial antigen of prostate (STEAP), mesothelin, A33 antigen, prostate stem cell antigen (PSCA), Ly-6, desmoglein 4, fetal acetylcholine receptor (fnAChR), CD25, cancer antigen 19-9 (CA19-9), cancer antigen 125 (CA-125), Muellerian inhibitory substance receptor type II (MISIIR), sialylated Tn antigen (sTN), fibroblast activation antigen (FAP), endosialin (CD248), epidermal growth factor receptor variant III (EGFRvIII), tumor-associated antigen L6 (TAL6), SAS, CD63, TAG72, Thomsen-Friedenreich antigen (TF-antigen), insulin-like growth factor I receptor (IGF-IR), Cora antigen, CD7, CD22, CD70 (e.g., its natural ligand, CD27 rather than an antibody fragment), CD79a, CD79b, G250, MT-MMPs, alpha-fetoprotein (AFP), VEGFR1, VEGFR2, DLK1, SP17, ROR1, EphA2, ENPP3, glypican 3 (GPC3), and TPBG/5T4 (trophoblast glycoprotein). The tumor-specific marker or the antigen of the target cell can be selected from alpha 4 integrin, Ang2, CEACAM5, cMET, CTLA4, FOLR1, EpCAM (epithelial cell adhesion molecule), CD19, HER2, HER2 neu, HER3, HER4, HER1 (EGFR), PD-L1, PSMA, CEA, TROP-2, MUC1(mucin), Lewis-Y, CD20, CD33, CD38, mesothelin, CD70 (e.g., its natural ligand, CD27 rather than an antibody fragment), VEGFR1, VEGFR2, ROR1, EphA2, ENPP3, glypican 3 (GPC3), and TPBG/5T4 (trophoblast glycoprotein). The VL and VH sequences of the binding domain (or binding moiety) (or the first binding domain, or the second binding domain) having specific binding affinity to a tumor-specific marker or an antigen of a target cell (or a target antigen) can exhibit at least (about) 90%, or at least (about) 91%, or at least (about) 92%, or at least (about) 93%, or at least (about) 94%, or at least (about) 95%, or at least (about) 96%, or at least (about) 97%, or at least (about) 98%, or at least (about) 99%, or 100%, sequence identity to any one of the paired VL and VH sequences set forth in the “VH Sequences” and “VL Sequences” columns of Table 6 (as described more fully hereinbelow).

[0292] Therapeutic monoclonal antibodies from which VL and VH and CDR domains can be derived for the subject compositions are known in the art. Such therapeutic antibodies include, but are not limited to, rituximab, IDEC/Genentech/Roche (see for example U.S. Pat. No. 5,736,137), a chimeric anti-CD20 antibody used in the treatment of many lymphomas, leukemias, and some autoimmune disorders; ofatumumab, an anti-CD20 antibody approved for use for chronic lymphocytic leukemia, and under development for follicular non-Hodgkin's lymphoma, diffuse large B cell lymphoma, rheumatoid arthritis and relapsing remitting multiple sclerosis, being developed by GlaxoSmithKline; lucatumumab (HCD122), an anti-CD40 antibody developed by Novartis for Non-Hodgkin's or Hodgkin's Lymphoma (see, for example, U.S. Pat. No. 6,899,879), AME-133, an antibody developed by Applied Molecular Evolution which binds to cells expressing CD20 to treat non-Hodgkin's lymphoma, veltuzumab (hA20), an antibody developed by Immunomedics, Inc. which binds to cells expressing CD20 to treat immune thrombocytopenic purpura, HumaLYM developed by Intracel for the treatment of low-grade B-cell lymphoma, and ocrelizumab, developed by Genentech which is an anti-CD20 monoclonal antibody for treatment of rheumatoid arthritis (see for example U.S. Patent Application 20090155257), trastuzumab (see for example U.S. Pat. No. 5,677,171), a humanized anti-Her2/neu antibody approved to treat breast cancer developed by Genentech; pertuzumab, an anti-HER2 dimerization inhibitor antibody developed by Genentech in treatment of in prostate, breast, and ovarian cancers; (see for example U.S. Pat. No. 4,753,894); cetuximab, an anti-EGFR antibody used to treat epidermal growth factor receptor (EGFR)-expressing, KRAS wild-type metastatic colorectal cancer and head and neck cancer, developed by Imclone and BMS (see U.S. Pat. No. 4,943,533; PCT WO 96/40210); panitumumab, a fully human monoclonal antibody specific to the epidermal growth factor receptor (also known as EGF receptor, EGFR, ErbB-1 and HER1, currently marketed by Amgen for treatment of metastatic colorectal cancer (see U.S. Pat. No. 6,235,883); zalutumumab, a fully human IgG1 monoclonal antibody developed by Genmab that is directed towards the epidermal growth factor receptor (EGFR) for the treatment of squamous cell carcinoma of the head and neck (see for example U.S. Pat. No. 7,247,301); nimotuzumab, a chimeric antibody to EGFR developed by Biocon, YM Biosciences, Cuba, and Oncosciences, Europe) in the treatment of squamous cell carcinomas of the head and neck, nasopharyngeal cancer and glioma (see for example U.S. Pat. Nos. 5,891,996; 6,506,883); alemtuzumab, a humanized monoclonal antibody to CD52 marketed by Bayer Schering Pharma for the treatment of chronic lymphocytic leukemia (CLL), cutaneous T-cell lymphoma (CTCL) and T-cell lymphoma; muromonab-CD3, an anti-CD3 antibody developed by Ortho Biotech/Johnson & Johnson used as an immunosuppressant biologic given to reduce acute rejection in patients with organ transplants; ibritumomab tiuxetan, an anti-CD20 monoclonal antibody developed by IDEC/Schering AG as treatment for some forms of B cell non-Hodgkin's lymphoma; gemtuzumab ozogamicin, an anti-CD33 (p67 protein) antibody linked to a cytotoxic chelator tiuxetan, to which a radioactive isotope can be attached, developed by Celltech/Wyeth used to treat acute myelogenous leukemia; ABX-CBL, an anti-CD147 antibody developed by Abgenix; ABX-IL8, an anti-IL8 antibody developed by Abgenix, ABX-MA1, an anti-MUC18 antibody developed by Abgenix, Pemtumomab (R1549, 90Y-muHMFG1), an anti-MUC1 in development by Antisoma, Therex (R1550), an anti-MUC1 antibody developed by Antisoma, AngioMab (AS1405), developed by Antisoma, HuBC-1, developed by Antisoma, Thioplatin (AS1407) developed by Antisoma, ANTEGREN (natalizumab), an anti-alpha-4-beta-1 (VLA4) and alpha-4-beta-7 antibody developed by Biogen, VLA-1 mAb, an anti-VLA-1 integrin antibody developed by Biogen, LTBR mAb, an anti-lymphotoxin beta receptor (LTBR) antibody developed by Biogen, CAT-152, an anti-TGF-β2 antibody developed by Cambridge Antibody Technology, J695, an anti-IL-12 antibody developed by Cambridge Antibody Technology and Abbott, CAT-192, an anti-TGFβ1 antibody developed by Cambridge Antibody Technology and Genzyme, CAT-213, an anti-Eotaxin 1 antibody developed by Cambridge Antibody Technology, LYMPHOSTAT-B, an anti-Blys antibody developed by Cambridge Antibody Technology and Human Genome Sciences Inc., TRAIL-R1mAb, an anti-TRAIL-R1 antibody developed by Cambridge Antibody Technology and Human Genome Sciences, Inc.; HERCEPTIN, an anti-HER receptor family antibody developed by Genentech; Anti-Tissue Factor (ATF), an anti-Tissue Factor antibody developed by Genentech; XOLAIR (Omalizumab), an anti-IgE antibody developed by Genentech, MLN-02 Antibody (formerly LDP-02), developed by Genentech and Millennium Pharmaceuticals; HUMAX CD4®, an anti-CD4 antibody developed by Genmab; tocilizuma, and anti-IL6R antibody developed by Chugai; HUMAX-IL15, an anti-IL15 antibody developed by Genmab and Amgen, HUMAX-Inflam, developed by Genmab and Medarex; HUMAX-Cancer, an anti-Heparanase I antibody developed by Genmab and Medarex and Oxford GlycoSciences; HUMAX-Lymphoma, developed by Genmab and Amgen, HUMAX-TAC, developed by Genmab; IDEC-131, an anti-CD40L antibody developed by IDEC Pharmaceuticals; IDEC-151 (Clenoliximab), an anti-CD4 antibody developed by IDEC Pharmaceuticals; IDEC-114, an anti-CD80 antibody developed by IDEC Pharmaceuticals; IDEC-152, an anti-CD23 developed by IDEC Pharmaceuticals; an anti-KDR antibody developed by Imclone, DC101, an anti-flk-1 antibody developed by Imclone; anti-VE cadherin antibodies developed by Imclone; CEA-CIDE (labetuzumab), an anti-carcinoembryonic antigen (CEA) antibody developed by Immunomedics; Yervoy (ipilimumab), an anti-CTLA4 antibody developed by Bristol-Myers Squibb in the treatment of melanoma; Lumphocide® (Epratuzumab), an anti-CD22 antibody developed by Immunomedics, AFP-Cide, developed by Immunomedics; MyelomaCide, developed by Immunomedics; LkoCide, developed by Immunomedics; ProstaCide, developed by Immunomedics; MDX-010, an anti-CTLA4 antibody developed by Medarex; MDX-060, an anti-CD30 antibody developed by Medarex; MDX-070 developed by Medarex; MDX-018 developed by Medarex; OSIDEM (IDM-1), an anti-HER2 antibody developed by Medarex and Immuno-Designed Molecules; HUMAX®-CD4, an anti-CD4 antibody developed by Medarex and Genmab; HuMax-IL15, an anti-IL15 antibody developed by Medarex and Genmab; anti-intercellular adhesion molecule-1 (ICAM-1) (CD54) antibodies developed by MorphoSys, MOR201; tremelimumab, an anti-CTLA-4 antibody developed by Pfizer; visilizumab, an anti-CD3 antibody developed by Protein Design Labs; Anti-a 5β1 Integrin, developed by Protein Design Labs; anti-IL-12, developed by Protein Design Labs; ING-1, an anti-Ep-CAM antibody developed by Xoma; and MLN01, an anti-Beta2 integrin antibody developed by Xoma; all of the above-cited antibody references in this paragraph are expressly incorporated herein by reference. The sequences for the above antibodies can be obtained from publicly available databases, patents, or literature references.

[0293] Methods to measure binding affinity and/or other biologic activity of the subject compositions of the invention can be those disclosed herein or methods generally known in the art. For example, the binding affinity of a binding pair (e.g., antibody and antigen), denoted as K_{d}, can be determined using various suitable assays including, but not limited to, radioactive binding assays, non-radioactive binding assays such as fluorescence resonance energy transfer and surface plasmon resonance (SPR, Biacore), and enzyme-linked immunosorbent assays (ELISA), kinetic exclusion assay (KinExA®), reporter gene activity assay, or as described in the Examples. An increase or decrease in binding affinity, for example of a subject therapeutic agent (e.g., a chimeric polypeptide assembly) which has been cleaved to remove a masking moiety compared to the therapeutic agent (e.g., the chimeric polypeptide assembly) with the masking moiety attached, can be determined by measuring the binding affinity of the therapeutic agent (e.g., the chimeric polypeptide assembly) to its target binding partner with and without the masking moiety.

[0294] Measurement of half-life of a subject therapeutic agent can be performed by various suitable methods. For example, the half-life of a substance can be determined by administering the substance to a subject and periodically sampling a biological sample (e.g., biological fluid such as blood or plasma or ascites) to determine the concentration and/or amount of that substance in the sample over time. The concentration of a substance in a biological sample can be determined using various suitable methods, including enzyme-linked immunosorbent assays (ELISA), reporter gene activity assays, immunoblots, and chromatography techniques including high-pressure liquid chromatography and fast protein liquid chromatography. In some cases, the substance may be labeled with a detectable tag, such as a radioactive tag or a fluorescence tag, which can be used to determine the concentration of the substance in the sample (e.g., a blood sample, a serum sample, or a plasma sample. The various pharmacokinetic parameters are then determined from the results, which can be done using software packages such as SoftMax Pro software, or by manual calculations known in the art.

[0295] In addition, the physicochemical properties of the subject therapeutic agents (e.g., the chimeric polypeptide assembly compositions) may be measured to ascertain the degree of solubility, structure and retention of stability. Assays of the subject compositions are conducted that allow determination of binding characteristics of the binding domains (or binding moieties) towards a ligand, including binding dissociation constant (K_{d}, Kₒₙ and K_{off}), the half-life of dissociation of the ligand-receptor complex, as well as the activity of the binding domain (or binding moiety) to inhibit the biologic activity of the sequestered ligand compared to free ligand (IC₅₀ values). The term “IC₅₀” refers to the concentration needed to inhibit half of the maximum biological response of the ligand agonist, and can be generally determined by competition binding assays. The term “EC₅₀” refers to the concentration needed to achieve half of the maximum biological response of the active substance, and can be generally determined by ELISA or cell-based assays, and/or reporter gene activity assay, including the methods of the Examples described herein.

### Anti-CD3 Binding Domains

[0296] The CD3 complex is a group of cell surface molecules that associates with the T-cell antigen receptor (TCR) and functions in the cell surface expression of TCR and in the signaling transduction cascade that originates when a peptide:MHC ligand binds to the TCR. Typically, when an antigen binds to the T-cell receptor, the CD3 sends signals through the cell membrane to the cytoplasm inside the T cell. This causes activation of the T cell that rapidly divide to produce new T cells sensitized to attack the particular antigen to which the TCR were exposed. The CD3 complex is comprised of the CD3epsilon molecule, along with four other membrane-bound polypeptides (CD3-gamma, -delta, -zeta, and -beta). In humans, CD3-epsilon is encoded by the CD3E gene on Chromosome 11. The intracellular domains of each of the CD3 chains contain immunoreceptor tyrosine-based activation motifs (ITAMs) that serve as the nucleating point for the intracellular signal transduction machinery upon T cell receptor engagement.

[0297] A number of therapeutic strategies modulate T cell immunity by targeting TCR signalling, particularly the anti-human CD3 monoclonal antibodies (mAbs) that are widely used clinically in immunosuppressive regimes. The CD3-specific mouse mAb OKT3 was the first mAb licensed for use in humans (Sgro, C. Side-effects of a monoclonal antibody, muromonab CD3/orthoclone OKT3: bibliographic review. Toxicology 105:23-29, 1995) and is widely used clinically as an immunosuppressive agent in transplantation (Chatenoud, Clin. Transplant 7:422-430, (1993); Chatenoud, Nat. Rev. Immunol. 3:123-132 (2003); Kumar, Transplant. Proc. 30:1351-1352 (1998)), type 1 diabetes, and psoriasis. Importantly, anti-CD3 mAbs can induce partial T cell signalling and clonal anergy (Smith, JA, Nonmitogenic Anti-CD3 Monoclonal Antibodies Deliver a Partial T Cell Receptor Signal and Induce Clonal Anergy J. Exp. Med. 185:1413-1422 (1997)). OKT3 has been described in the literature as a T cell mitogen as well as a potent T cell killer (Wong, JT. The mechanism of anti-CD3 monoclonal antibodies. Mediation of cytolysis by inter-T cell bridging. Transplantation 50:683-689 (1990)). In particular, the studies of Wong demonstrated that by bridging CD3 T cells and target cells, one could achieve killing of the target and that neither FcR-mediated ADCC nor complement fixation was necessary for bivalent anti-CD3 MAB to lyse the target cells.

[0298] OKT3 exhibits both a mitogenic and T-cell killing activity in a time-dependent fashion; following early activation of T cells leading to cytokine release, upon further administration OKT3 later blocks all known T-cell functions. It is due to this later blocking of T cell function that OKT3 has found such wide application as an immunosuppressant in therapy regimens for reduction or even abolition of allograft tissue rejection. Other antibodies specific for the CD3 molecule are disclosed in Tunnacliffe, Int. Immunol. 1 (1989), 546-50, WO2005/118635 and WO2007/033230 describe anti-human monoclonal CD3 epsilon antibodies, U.S. Pat. No. 5,821,337 describes the VL and VH sequences of murine anti-CD3 monoclonal Ab UCHT1 (muxCD3, Shalaby et al., J. Exp. Med. 175, 217-225 (1992) and a humanized variant of this antibody (hu UCHT1), and United States Patent Application 20120034228 discloses binding domains capable of binding to an epitope of human and non-chimpanzee primate CD3 epsilon chain.

TABLE 5a
Anti-CD3 Monoclonal Antibodies and VH & VL Sequences

| Clone | Antibody | | | |
|---|---|---|---|---|
| Name | Name | Target | VH Sequence | VL Sequence |
| huOKT3 | | CD3 | QVQLVQSGGGVVQPGRSLRL | DIQMTQSPSSLSASVGDRVTIT |
| | | | SCKASGYTFTRYTMHWVRQ | CSASSSVSYMNWYQQTPGKA |
| | | | APGKGLEWIGYINPSRGYTN | PKRWIYDTSKLASGVPSRFSG |
| | | | YNQKVKDRFTISRDNSKNTA | SGSGTDYTFTISSLQPEDIATY |
| | | | FLQMDSLRPEDTGVYFCARY | YCQQWSSNPFTFGQGTKLQI |
| | | | YDDHYCLDYWGQGTPVTVS | TR (SEQ ID NO: 479) |
| | | | S (SEQ ID NO: 469) | |
| huUCHT1 | | CD3 | EVQLVESGGGLVQPGGSLRLS | DIQMTQSPSSLSASVGDRVTIT |
| | | | CAASGYSFTGYTMNWVRQA | CRASQDIRNYLNWYQQKPG |
| | | | PGKGLEWVALINPYKGVSTY | KAPKLLIYYTSRLESGVPSRF |
| | | | NQKFKDRFTISVDKSKNTAYL | SGSGSGTDYTLTISSLQPEDFA |
| | | | QMNSLRAEDTAVYYCARSG | TYYCQQGNTLPWTFGQGTK |
| | | | YYGDSDWYFDVWGQGTLVT | VEIK (SEQ ID NO: 480) |
| | | | VSS (SEQ ID NO: 470) | |
| hu12F6 | | CD3 | QVQLVQSGGGVVQPGRSLRL | DIQMTQSPSSLSASVGDRVTM |
| | | | SCKASGYTFTSYTMHWVRQ | TCRASSSVSYMHWYQQTPG |
| | | | APGKGLEWIGYINPSSGYTK | KAPKPWIYATSNLASGVPSRF |
| | | | YNQKFKDRFTISADKSKSTAF | SGSGSGTDYTLTISSLQPEDIA |
| | | | LQMDSLRPEDTGVYFCARW | TYYCQQWSSNPPTFGQGTKL |
| | | | QDYDVYFDYWGQGTPVTVS | QITR (SEQ ID NO: 481) |
| | | | S (SEQ ID NO: 471) | |
| mOKT3 | | CD3 | QVQLQQSGAELARPGASVKM | QIVLTQSPAIMSASPGEKVTM |
| | | | SCKASGYTFTRYTMHWVKQ | TCSASSSVSYMNWYQQKSGT |
| | | | RPGQGLEWIGYINPSRGYTN | SPKRWIYDTSKLASGVPAHF |
| | | | YNQKFKDKATLTTDKSSSTA | RGSGSGTSYSLTISGMEAEDA |
| | | | YMQLSSLTSEDSAVYYCARY | ATYYCQQWSSNPFTFGSGTK |
| | | | YDDHYCLDYWGQGTTLTVS | LEINR (SEQ ID NO: 482) |
| | | | S (SEQ ID NO: 472) | |
| MT103 | blinatumo | CD3 | DIKLQQSGAELARPGASVKM | DIQLTQSPAIMSASPGEKVTM |
| | mab | | SCKTSGYTFTRYTMHWVKQ | TCRASSSVSYMNWYQQKSGT |
| | | | RPGQGLEWIGYINPSRGYTN | SPKRWIYDTSKVASGVPYRFS |
| | | | YNQKFKDKATLTTDKSSSTA | GSGSGTSYSLTISSMEAEDAA |
| | | | YMQLSSLTSEDSAVYYCARY | TYYCQQWSSNPLTFGAGTKL |
| | | | YDDHYCLDYWGQGTTLTVS | ELK (SEQ ID NO: 483) |
| | | | S (SEQ ID NO: 473) | |
| MT110 | solitomab | CD3 | DVQLVQSGAEVKKPGASVKV | DIVLTQSPATLSLSPGERATLS |
| | | | SCKASGYTFTRYTMHWVRQ | CRASQSVSYMNWYQQKPGK |
| | | | APGQGLEWIGYINPSRGYTN | APKRWIYDTSKVASGVPARF |
| | | | YADSVKGRFTITTDKSTSTAY | SGSGSGTDYSLTINSLEAEDA |
| | | | MELSSLRSEDTATYYCARYY | ATYYCQQWSSNPLTFGGGT |
| | | | DDHYCLDYWGQGTTVTVSS | KVEIK (SEQ ID NO: 484) |
| | | | (SEQ ID NO: 474) | |
| CD3.7 | | CD3 | EVQLVESGGGLVQPGGSLKL | QTVVTQEPSLTVSPGGTVTLT |
| | | | SCAASGFTFNKYAMNWVRQ | CGSSTGAVTSGYYPNWVQQK |
| | | | APGKGLEWVARIRSKYNNYA | PGQAPRGLIGGTKFLAPGTPA |
| | | | TYYADSVKDRFTISRDDSKNT | RFSGSLLGGKAALTLSGVQPE |
| | | | AYLQMNNLKTEDTAVYYCV | DEAEYYCALWYSNRWVFGG |
| | | | RHGNFGNSYISYWAYWGQG | GTKLTVL (SEQ ID NO: 485) |
| | | | TLVTVSS (SEQ ID NO: 475) | |
| CD3.8 | | CD3 | EVQLVESGGGLVQPGGSLRLS | QAVVTQEPSLTVSPGGTVTLT |
| | | | CAASGFTFNTYAMNWVRQA | CGSSTGAVTTSNYANWVQQK |
| | | | PGKGLEWVGRIRSKYNNYAT | PGQAPRGLIGGTNKRAPGVPA |
| | | | YYADSVKGRFTISRDDSKNTL | RFSGSLLGGKAALTLSGAQPE |
| | | | YLQMNSLRAEDTAVYYCVR | DEAEYYCALWYSNLWVFGG |
| | | | HGNFGNSYVSWFAYWGQGT | GTKLTVL (SEQ ID NO: 486) |
| | | | LVTVSS (SEQ ID NO: 476) | |
| CD3.9 | | CD3 | EVQLLESGGGLVQPGGSLKLS | ELVVTQEPSLTVSPGGTVTLT |
| | | | CAASGFTFNTYAMNWVRQA | CRSSTGAVTTSNYANWVQQK |
| | | | PGKGLEWVARIRSKYNNYAT | PGQAPRGLIGGTNKRAPGTPA |
| | | | YYADSVKDRFTISRDDSKNTA | RFSGSLLGGKAALTLSGVQPE |
| | | | YLQMNNLKTEDTAVYYCVR | DEAEYYCALWYSNLWVFGG |
| | | | HGNFGNSYVSWFAYWGQGT | GTKLTVL (SEQ ID NO: 487) |
| | | | LVTVSS (SEQ ID NO: 477) | |
| CD3.10 | | CD3 | EVKLLESGGGLVQPKGSLKLS | QAVVTQESALTTSPGETVTLT |
| | | | CAASGFTFNTYAMNWVRQA | CRSSTGAVTTSNYANWVQEK |
| | | | PGKGLEWVARIRSKYNNYAT | PDHLFTGLIGGTNKRAPGVPA |
| | | | YYADSVKDRFTISRDDSQSIL | RFSGSLIGDKAALTITGAQTE |
| | | | YLQMNNLKTEDTAMYYCVR | DEAIYFCALWYSNLWVFGGG |
| | | | HGNFGNSYVSWFAYWGQGT | TKLTVL (SEQ ID NO: 488) |
| | | | LVTVSS (SEQ ID NO: 478) | |

*underlined sequences, if present, are CDRs within the VL and VH

[0299] In some embodiments of the compositions of this disclosure, the BP can comprise a binding domain (or a binding moiety) (such as an antigen binding fragment) having specific binding affinity for an effector cell antigen. The effector cell antigen can be expressed on the surface of an effector cell selected from a plasma cell, a T cell, a B cell, a cytokine induced killer cell (CIK cell), a mast cell, a dendritic cell, a regulatory T cell (RegT cell), a helper T cell, a myeloid cell, and a NK cell. The effector cell antigen can be expressed on the surface of a T cell. The binding domain (or binding moiety) can have binding affinity for CD3. In some embodiments, where the binding domain (or binding moiety) having binding affinity for CD3, the binding domain (or binding moiety) can have binding affinity for a member of the CD3 complex, which includes in individual form or independently combined form all known CD3 subunits of the CD3 complex; for example, CD3 epsilon, CD3 delta, CD3 gamma, CD3 zeta, CD3 alpha and CD3 beta. The binding domain (or binding moiety) having binding affinity for CD3 can have binding affinity for CD3 epsilon, CD3 delta, CD3 gamma, CD3 zeta, CD3 alpha or CD3 beta.

[0300] The origin of the antigen binding fragments (comprised in the binding domain or binding moiety) contemplated by the disclosure can be derived from a naturally occurring antibody or fragment thereof, a non-naturally occurring antibody or fragment thereof, a humanized antibody or fragment thereof, a synthetic antibody or fragment thereof, a hybrid antibody or fragment thereof, or an engineered antibody or fragment thereof. Methods for generating an antibody for a given target marker are well known in the art. For example, the monoclonal antibodies may be made using the hybridoma method first described by Kohler et al., Nature, 256:495 (1975), or may be made by recombinant DNA methods (U.S. Pat. No. 4,816,567). The structure of antibodies and fragments thereof, variable regions of heavy and light chains of an antibody (VH and VL), single chain variable regions (scFv), complementarity determining regions (CDR), and domain antibodies (dAbs) are well understood. Methods for generating a polypeptide having a desired antigen binding fragment with binding affinity to a given antigen are known in the art.

[0301] It will be understood that use of the term antigen binding fragments for the composition embodiments disclosed herein is intended to include portions or fragments of antibodies that retain the ability to bind the antigens that are the ligands of the corresponding intact antibody. In such embodiments, the antigen binding fragment can be, but is not limited to, CDRs and intervening framework regions, variable or hypervariable regions of light and/or heavy chains of an antibody (VL, VH), variable fragments (Fv), Fab′ fragments, F(ab′)2 fragments, Fab fragments, single chain antibodies (scAb), VHH camelid antibodies, single chain variable fragment (scFv), linear antibodies, a single domain antibody, complementarity determining regions (CDR), domain antibodies (dAbs), single domain heavy chain immunoglobulins of the BHH or BNAR type, single domain light chain immunoglobulins, or other polypeptides known in the art containing a fragment of an antibody capable of binding an antigen. The antigen binding fragments having CDR-H and CDR-L can be configured in a (CDR-H)-(CDR-L) or a (CDR-H)-(CDR-L) orientation, N-terminus to C-terminus. The VL and VH of two antigen binding fragments can also be configured in a single chain diabody configuration; e.g., the VL and VH of the first and second binding domains (or binding moieties) configured with linkers of an appropriate length to permit arrangement as a diabody.

[0302] Various CD3 binding domains of the disclosure have been specifically modified to enhance their stability in the polypeptide embodiments described herein. Binding specificity can be determined by complementarity determining regions (CDRs), such as light chain CDRs or heavy chain CDRs. In many cases, binding specificity is determined by light chain CDRs and heavy chain CDRs. A given combination of heavy chain CDRs and light chain CDRs provides a given binding pocket that confers greater affinity and/or specificity towards an effector cell antigen as compared to other reference antigens. Protein aggregation of antibodies continues to be a significant problem in their developability and remains a major area of focus in antibody production. Antibody aggregation can be triggered by partial unfolding of its domains, leading to monomer-monomer association followed by nucleation and aggregate growth. Although the aggregation propensities of antibodies and antibody-based proteins can be affected by the external experimental conditions, they are strongly dependent on the intrinsic antibody properties as determined by their sequences and structures. Although it is well known that proteins are only marginally stable in their folded states, it is often less well appreciated that most proteins are inherently aggregation-prone in their unfolded or partially unfolded states, and the resulting aggregates can be extremely stable and long-lived. Reduction in aggregation propensity has also been shown to be accompanied by an increase in expression titer, showing that reducing protein aggregation is beneficial throughout the development process and can lead to a more efficient path to clinical studies. For therapeutic proteins, aggregates are a significant risk factor for deleterious immune responses in patients, and can form via a variety of mechanisms. Controlling aggregation can improve protein stability, manufacturability, attrition rates, safety, formulation, titers, immunogenicity, and solubility. The intrinsic properties of proteins such as size, hydrophobicity, electrostatics and charge distribution play important roles in protein solubility. Low solubility of therapeutic proteins due to surface hydrophobicity has been shown to render formulation development more difficult and may lead to poor bio-distribution, undesirable pharmacokinetics behavior and immunogenicity in vivo. Decreasing the overall surface hydrophobicity of candidate monoclonal antibodies can also provide benefits and cost savings relating to purification and dosing regimens. Individual amino acids can be identified by structural analysis as being contributory to aggregation potential in an antibody, and can be located in CDR as well as framework regions. In particular, residues can be predicted to be at high risk of causing hydrophobicity issues in a given antibody.

[0303] In some embodiments, the invention provides therapeutic agents that comprise binding domain(s) with binding affinity to T cell antigen(s). In some embodiments, the binding domain with binding affinity to a T cell antigen can comprise VL and VH derived from a monoclonal antibody to an antigen of the cluster of differentiation 3 T cell receptor (CD3). The binding domain can comprise VL and VH derived from a monoclonal antibody to CD3epsilon and CD3delta subunits. Monoclonal antibodies to CD3 neu are known in the art. Exemplary, non-limiting examples of VL and VH sequences of monoclonal antibodies to CD3 are presented in Table 5a. The binding domain with binding affinity to CD3 can comprise anti-CD3 VL and VH sequences set forth in Table 5a. The binding domain with binding affinity to CD3epsilon can comprise anti-CD3epsilon VL and VH sequences set forth in Table 5a. The binding domain with binding affinity to CD3 can comprise VH and VL regions wherein each VH and VL regions exhibit at least (about) 90%, or at least (about) 91%, or at least (about) 92%, or at least (about) 93%, or at least (about) 94%, or at least (about) 95%, or at least (about) 96%, or at least (about) 97%, or at least (about) 98%, or at least (about) 99%, or 100% identity to paired VL and VH sequences of the huUCHT1 anti-CD3 antibody of Table 5a. The binding domain with binding affinity to CD3 can comprise the CDR-L1 region, the CDR-L2 region, the CDR-L3 region, the CDR-H1 region, the CDR-H2 region, and the CDR-H3 region, wherein each is derived from the respective anti-CD3 VL and VH sequences set forth in Table 5a. The binding domain with binding affinity to CD3 can comprise the CDR-L1 region, the CDR-L2 region, the CDR-L3 region, the CDR-H1 region, the CDR-H2 region, and the CDR-H3 region, wherein the CDR sequences. The binding domain with binding affinity to CD3 can comprise the CDR-L1 region, the CDR-L2 region, the CDR-L3 region, the CDR-H1 region, the CDR-H2 region, and the CDR-H3 region, wherein the CDR sequences are RASQDIRNYLN (SEQ ID NO: 489), YTSRLES (SEQ ID NO: 490), QQGNTLPWT (SEQ ID NO: 491), GYSFTGYTMN (SEQ ID NO: 492), LINPYKGVST (SEQ ID NO: 493), and SGYYGDSDWYFDV (SEQ ID NO: 494).

[0304] In some embodiments, the present disclosure provides a binding domain (or binding moiety) that binds CD3, for incorporation into the compositions described herein, can comprise CDR-L and CDR-H. The binding domain binding CD3 can comprise a CDR-H1, a CDR-H2, and a CDR-H3, each (independently) having an amino acid sequence exhibiting at least 85%, 86%, 87%, 88%, 89%, 90%, 91%, 92%, 93%, 94%, 95%, 96%, 97%, 98%, 99% sequence identity or is identical to the amino acid sequence set forth in Table 5b. The binding domain binding CD3 can comprise a CDR-L1, a CDR-L2, and a CDR-L3, each (independently) having an amino acid sequence exhibiting at least 85%, 86%, 87%, 88%, 89%, 90%, 91%, 92%, 93%, 94%, 95%, 96%, 97%, 98%, 99% sequence identity or is identical to the amino acid sequence set forth in Table 5b.

[0305] In some embodiments, the present disclosure provides a binding domain (or binding moiety) that binds CD3, for incorporation into the compositions described herein, can comprise light chain framework regions (FR-L) and heavy chain framework regions (FR-H). The binding domain binding CD3 can comprise a FR-L1 exhibiting at least 86%, 87%, 88%, 89%, 90%, 91%, 92%, 93%, 94%, 95%, 96%, 97%, 98%, 99% sequence identity or is identical to a FR-L1 sequence set forth in Table 5c. The binding domain binding CD3 can comprise a FR-L2 exhibiting at least 86%, 87%, 88%, 89%, 90%, 91%, 92%, 93%, 94%, 95%, 96%, 97%, 98%, 99% sequence identity or is identical to a FR-L2 sequence set forth in Table 5c. The binding domain binding CD3 can comprise a FR-L3 exhibiting at least 86%, 87%, 88%, 89%, 90%, 91%, 92%, 93%, 94%, 95%, 96%, 97%, 98%, 99% sequence identity or is identical to a FR-L3 sequence set forth in Table 5c. The binding domain binding CD3 can comprise a FR-L4 exhibiting at least 86%, 87%, 88%, 89%, 90%, 91%, 92%, 93%, 94%, 95%, 96%, 97%, 98%, 99% sequence identity or is identical to a FR-L4 sequence set forth in Table 5c. The binding domain binding CD3 can comprise a FR-H1 exhibiting at least 86%, 87%, 88%, 89%, 90%, 91%, 92%, 93%, 94%, 95%, 96%, 97%, 98%, 99% sequence identity or is identical to a FR-H1 sequence set forth in Table 5c. The binding domain binding CD3 can comprise a FR-H2 exhibiting at least 86%, 87%, 88%, 89%, 90%, 91%, 92%, 93%, 94%, 95%, 96%, 97%, 98%, 99% sequence identity or is identical to a FR-H2 sequence set forth in Table 5c. The binding domain binding CD3 can comprise a FR-H3 exhibiting at least 86%, 87%, 88%, 89%, 90%, 91%, 92%, 93%, 94%, 95%, 96%, 97%, 98%, 99% sequence identity or is identical to a FR-H3 sequence set forth in Table 5c. The binding domain binding CD3 can comprise a FR-H4 exhibiting at least 86%, 87%, 88%, 89%, 90%, 91%, 92%, 93%, 94%, 95%, 96%, 97%, 98%, 99% sequence identity or is identical to a FR-H4 sequence set forth in Table 5c.

[0306] In some embodiments, the present disclosure provides a binding domain (or binding moiety) that binds CD3, for incorporation into the compositions described herein, can comprise a variable light (VL) amino acid sequence and a variable heavy (VH) amino acid sequence. The binding domain that binds CD3 can comprise a VL exhibiting at least 86%, 87%, 88%, 89%, 90%, 91%, 92%, 93%, 94%, 95%, 96%, 97%, 98%, 99% sequence identity or is identical to a VL sequence set forth in Table 5d. The binding domain that binds CD3 can comprise a VH exhibiting at least 86%, 87%, 88%, 89%, 90%, 91%, 92%, 93%, 94%, 95%, 96%, 97%, 98%, 99% sequence identity or is identical to a VH sequence set forth in Table 5d. The binding domain that binds CD3 can comprise an amino acid sequence exhibiting at least 86%, 87%, 88%, 89%, 90%, 91%, 92%, 93%, 94%, 95%, 96%, 97%, 98%, 99% sequence identity or is identical to a scFv sequence set forth in Table 5d.

[0307] In some embodiments of the compositions of this disclosure, the VL and VH of the antigen binding fragments can be fused by relatively long linkers, consisting 25, 26, 27, 28, 29, 30, 31, 32, 33, 34, or 35 hydrophilic amino acids that, when joined together, have a flexible characteristic. In some embodiment, the VL and VH of any of the scFv embodiments described herein can be linked by relatively long linkers of hydrophilic amino acids selected from the sequences GSGEGSEGEGGGEGSEGEGSGEGGEGEGSG (SEQ ID NO: 495), TGSGEGSEGEGGGEGSEGEGSGEGGEGEGSGT (SEQ ID NO: 496), GATPPETGAETESPGETTGGSAESEPPGEG (SEQ ID NO: 497), or GSAAPTAGTTPSASPAPPTGGSSAAGSPST (SEQ ID NO: 498).

[0308] In some embodiments of the compositions of this disclosure, where the BP comprises a first binding domain (or first binding moiety) and a second binding domain (or second binding moiety), the first and second binding domains (or the first and second binding moieties) can be linked together by a short linker of hydrophilic amino acids having 3, 4, 5, 6, or 7 amino acids. The short linker sequences can be selected from the group of sequences SGGGGS (SEQ ID NO: 499), GGGGS (SEQ ID NO: 500), GGSGGS (SEQ ID NO: 501), GGS, or GSP. In some embodiment, the disclosure provides compositions comprising a single chain diabody in which after folding, the first domain (VL or VH) is paired with the last domain (VH or VL) to form one scFv and the two domains in the middle are paired to form the other scFv in which the first and second domains, as well as the third and last domains, are fused together by one of the foregoing short linkers and the second and the third variable domains are fused by one of the foregoing relatively long linkers. As will be appreciated by one of skill in the art, the selection of the short linker and relatively long linker can be to prevent the incorrect pairing of adjacent variable domains, thereby facilitating the formation of the single chain diabody configuration comprising the VL and VH of the first antigen binding fragment and the second antigen binding fragment.

TABLE 5b
Exemplary CD3 CDR Sequences

| | | SEQ ID | |
|---|---|---|---|
| Construct | Region | NO: | Amino Acid Sequence |
| 3.23, 3.30, 3.31, 3.32 | CDR-L1 | 502 | RSSNGAVTSSNYAN |
| 3.24 | CDR-L1 | 503 | RSSNGEVTTSNYAN |
| 3.33, 3.9 | CDR-L1 | 504 | RSSTGAVTTSNYAN |
| 3.23, 3.30, 3.31, 3.32, 3.9, 3.33 | CDR-L2 | 505 | GTNKRAP |
| 3.24 | CDR-L2 | 506 | GTIKRAP |
| 3.23, 3.24, 3.30, 3.31, 3.32 | CDR-L3 | 507 | ALWYPNLWVF |
| 3.33, 3.9 | CDR-L3 | 508 | ALWYSNLWVF |
| 3.23, 3.24, 3.30, 3.31, 3.32, | CDR-H1 | 509 | GFTFNTYAMN |
| 3.9, 3.33 | | | |
| 3.23, 3.24, 3.30, 3.31, 3.32, | CDR-H2 | 510 | RIRSKYNNYATYYADSVKD |
| 3.9, 3.33 | | | |
| 3.23. 3.24, 3.30, 3.31, 3.32 | CDR-H3 | 511 | HENFGNSYVSWFAH |
| 3.9, 3.33 | CDR-H3 | 512 | HGNFGNSYVSWFAY |

TABLE 5c
Exemplary CD3 FR Sequences

| | | SEQ | |
|---|---|---|---|
| Construct | Region | ID NO: | Amino Acid Sequence |
| 3.23, 3.24, 3.30, | FR-L1 | 513 | ELVVTQEPSLTVSPGGTVTLTC |
| 3.31, 3.32, 3.9, | | | |
| 3.33 | | | |
| 3.23, 3.24, 3.30, | FR-L2 | 514 | WVQQKPGQAPRGLIG |
| 3.31, 3.32, 3.9, | | | |
| 3.33 | | | |
| 3.23, 3.24 | FR-L3 | 515 | GTPARFSGSLLGGKAALTLSGVQPEDEAVYYC |
| 3.30 | FR-L3 | 516 | GTPARFSGSSLGGKAALTLSGVQPEDEAVYYC |
| 3.31 | FR-L3 | 517 | GTPARFSGSLLGGSAALTLSGVQPEDEAVYYC |
| 3.32 | FR-L3 | 518 | GTPARFSGSSLGGSAALTLSGVQPEDEAVYYC |
| 3.9 | FR-L3 | 519 | GTPARFSGSLLGGKAALTLSGVQPEDEAEYYC |
| 3.33 | FR-L3 | 520 | GTPARFSGSSLGGSAALTLSGVQPEDEAEYYC |
| 3.23, 3.24, 3.30, | FR-L4 | 521 | GGGTKLTVL |
| 3.31, 3.32, 3.9, | | | |
| 3.33 | | | |
| 3.23. 3.24 | FR-H1 | 522 | EVQLLESGGGIVQPGGSLKLSCAAS |
| 3.30, 3.31, 3.32 | FR-H1 | 523 | EVQLQESGGGIVQPGGSLKLSCAAS |
| 3.33 | FR-H1 | 524 | EVQLQESGGGLVQPGGSLKLSCAAS |
| 3.9 | FR-H1 | 525 | EVQLLESGGGLVQPGGSLKLSCAAS |
| 3.23, 3.24, 3.30, | FR-H2 | 526 | WVRQAPGKGLEWVA |
| 3.31, 3.32, 3.9, | | | |
| 3.33 | | | |
| 3.23, 3.24, 3.30, | FR-H3 | 527 | RFTISRDDSKNTVYLQMNNLKTEDTAVYYCVR |
| 3.31, 3.32 | | | |
| 3.9. 3.33 | FR-H3 | 528 | RFTISRDDSKNTAYLQMNNLKTEDTAVYYCVR |
| 3.23, 3.24, 3.30, | FR-H4 | 529 | WGQGTLVTVSS |
| 3.31, 3.32, 3.9, | | | |
| 3.33 | | | |

TABLE 5d
Exemplary VL & VH Sequences

| | | SEQ ID | |
|---|---|---|---|
| Construct | Region | NO: | Amino Acid Sequence |
| 3.23 | VL | 530 | ELVVTQEPSLTVSPGGTVTLTCRSSNGAVTSSNYANWVQQKPGQAPR |
| | | | GLIGGTNKRAPGTPARFSGSLLGGKAALTLSGVQPEDEAVYYCALWY |
| | | | PNLWVFGGGTKLTVL |
| 3.23, | VH | 531 | EVQLLESGGGIVQPGGSLKLSCAASGFTFNTYAMNWVRQAPGKGLEW |
| 3.24 | | | VARIRSKYNNYATYYADSVKDRFTISRDDSKNTVYLQMNNLKTEDTA |
| | | | VYYCVRHENFGNSYVSWFAHWGQGTLVTVSS |
| 3.24 | VL | 532 | ELVVTQEPSLTVSPGGTVTLTCRSSNGEVTTSNYANWVQQKPGQAPR |
| | | | GLIGGTIKRAPGTPARFSGSLLGGKAALTLSGVQPEDEAVYYCALWYP |
| | | | NLWVFGGGTKLTVL |
| 3.30 | VL | 533 | ELVVTQEPSLTVSPGGTVTLTCRSSNGAVTSSNYANWVQQKPGQAPR |
| | | | GLIGGTNKRAPGTPARFSGSSLGGKAALTLSGVQPEDEAVYYCALWY |
| | | | PNLWVFGGGTKLTVL |
| 3.30, | VH | 534 | EVQLQESGGGIVQPGGSLKLSCAASGFTFNTYAMNWVRQAPGKGLEW |
| 3.31, | | | VARIRSKYNNYATYYADSVKDRFTISRDDSKNTVYLQMNNLKTEDTA |
| 3.32 | | | VYYCVRHENFGNSYVSWFAHWGQGTLVTVSS |
| 3.31 | VL | 535 | ELVVTQEPSLTVSPGGTVTLTCRSSNGAVTSSNYANWVQQKPGQAPR |
| | | | GLIGGTNKRAPGTPARFSGSLLGGSAALTLSGVQPEDEAVYYCALWYP |
| | | | NLWVFGGGTKLTVL |
| 3.32 | VL | 536 | ELVVTQEPSLTVSPGGTVTLTCRSSNGAVTSSNYANWVQQKPGQAPR |
| | | | GLIGGTNKRAPGTPARFSGSSLGGSAALTLSGVQPEDEAVYYCALWYP |
| | | | NLWVFGGGTKLTVL |
| 3.9 | VL | 537 | ELVVTQEPSLTVSPGGTVTLTCRSSTGAVTTSNYANWVQQKPGQAPR |
| | | | GLIGGTNKRAPGTPARFSGSLLGGKAALTLSGVQPEDEAEYYCALWYS |
| | | | NLWVFGGGTKLTVL |
| 3.9 | VH | 538 | EVQLLESGGGLVQPGGSLKLSCAASGFTFNTYAMNWVRQAPGKGLE |
| | | | WVARIRSKYNNYATYYADSVKDRFTISRDDSKNTAYLQMNNLKTEDT |
| | | | AVYYCVRHGNFGNSYVSWFAYWGQGTLVTVSS |
| 3.33 | VL | 539 | ELVVTQEPSLTVSPGGTVTLTCRSSTGAVTTSNYANWVQQKPGQAPR |
| | | | GLIGGTNKRAPGTPARFSGSSLGGSAALTLSGVQPEDEAEYYCALWYS |
| | | | NLWVFGGGTKLTVL |
| 3.33 | VH | 540 | EVQLQESGGGLVQPGGSLKLSCAASGFTFNTYAMNWVRQAPGKGLE |
| | | | WVARIRSKYNNYATYYADSVKDRFTISRDDSKNTAYLQMNNLKTEDT |
| | | | AVYYCVRHGNFGNSYVSWFAYWGQGTLVTVSS |

TABLE 5e
Exemplary scFv Sequences

| | SEQ ID | |
|---|---|---|
| Construct | NO: | Amino Acid Sequence |
| 3.23 | 541 | ELVVTQEPSLTVSPGGTVTLTCRSSNGAVTSSNYANWVQQKPGQAPRGLIGG |
| | | TNKRAPGTPARFSGSLLGGKAALTLSGVQPEDEAVYYCALWYPNLWVFGG |
| | | GTKLTVLGATPPETGAETESPGETTGGSAESEPPGEGEVQLLESGGGIVQPGG |
| | | SLKLSCAASGFTFNTYAMNWVRQAPGKGLEWVARIRSKYNNYATYYADSV |
| | | KDRFTISRDDSKNTVYLQMNNLKTEDTAVYYCVRHENFGNSYVSWFAHWG |
| | | QGTLVTVSS |
| 3.24 | 542 | ELVVTQEPSLTVSPGGTVTLTCRSSNGEVTTSNYANWVQQKPGQAPRGLIGG |
| | | TIKRAPGTPARFSGSLLGGKAALTLSGVQPEDEAVYYCALWYPNLWVFGGG |
| | | TKLTVLGATPPETGAETESPGETTGGSAESEPPGEGEVQLLESGGGIVQPGGS |
| | | LKLSCAASGFTFNTYAMNWVRQAPGKGLEWVARIRSKYNNYATYYADSVK |
| | | DRFTISRDDSKNTVYLQMNNLKTEDTAVYYCVRHENFGNSYVSWFAHWGQ |
| | | GTLVTVSS |
| 3.30 | 543 | ELVVTQEPSLTVSPGGTVTLTCRSSNGAVTSSNYANWVQQKPGQAPRGLIGG |
| | | TNKRAPGTPARFSGSSLGGKAALTLSGVQPEDEAVYYCALWYPNLWVFGGG |
| | | TKLTVLGATPPETGAETESPGETTGGSAESEPPGEGEVQLQESGGGIVQPGGS |
| | | LKLSCAASGFTFNTYAMNWVRQAPGKGLEWVARIRSKYNNYATYYADSVK |
| | | DRFTISRDDSKNTVYLQMNNLKTEDTAVYYCVRHENFGNSYVSWFAHWGQ |
| | | GTLVTVSS |
| 3.31 | 544 | ELVVTQEPSLTVSPGGTVTLTCRSSNGAVTSSNYANWVQQKPGQAPRGLIGG |
| | | TNKRAPGTPARFSGSLLGGSAALTLSGVQPEDEAVYYCALWYPNLWVFGGG |
| | | TKLTVLGATPPETGAETESPGETTGGSAESEPPGEGEVQLQESGGGIVQPGGS |
| | | LKLSCAASGFTFNTYAMNWVRQAPGKGLEWVARIRSKYNNYATYYADSVK |
| | | DRFTISRDDSKNTVYLQMNNLKTEDTAVYYCVRHENFGNSYVSWFAHWGQ |
| | | GTLVTVSS |
| 3.32 | 545 | ELVVTQEPSLTVSPGGTVTLTCRSSNGAVTSSNYANWVQQKPGQAPRGLIGG |
| | | TNKRAPGTPARFSGSSLGGSAALTLSGVQPEDEAVYYCALWYPNLWVFGGG |
| | | TKLTVLGATPPETGAETESPGETTGGSAESEPPGEGEVQLQESGGGIVQPGGS |
| | | LKLSCAASGFTFNTYAMNWVRQAPGKGLEWVARIRSKYNNYATYYADSVK |
| | | DRFTISRDDSKNTVYLQMNNLKTEDTAVYYCVRHENFGNSYVSWFAHWGQ |
| | | GTLVTVSS |
| 3.9 | 546 | ELVVTQEPSLTVSPGGTVTLTCRSSTGAVTTSNYANWVQQKPGQAPRGLIGG |
| | | TNKRAPGTPARFSGSLLGGKAALTLSGVQPEDEAEYYCALWYSNLWVFGGG |
| | | TKLTVLGATPPETGAETESPGETTGGSAESEPPGEGEVQLLESGGGLVQPGGS |
| | | LKLSCAASGFTFNTYAMNWVRQAPGKGLEWVARIRSKYNNYATYYADSVK |
| | | DRFTISRDDSKNTAYLQMNNLKTEDTAVYYCVRHGNFGNSYVSWFAYWGQ |
| | | GTLVTVSS |
| 3.33 | 547 | ELVVTQEPSLTVSPGGTVTLTCRSSTGAVTTSNYANWVQQKPGQAPRGLIGG |
| | | TNKRAPGTPARFSGSSLGGSAALTLSGVQPEDEAEYYCALWYSNLWVFGGG |
| | | TKLTVLGATPPETGAETESPGETTGGSAESEPPGEGEVQLQESGGGLVQPGGS |
| | | LKLSCAASGFTFNTYAMNWVRQAPGKGLEWVARIRSKYNNYATYYADSVK |
| | | DRFTISRDDSKNTAYLQMNNLKTEDTAVYYCVRHGNFGNSYVSWFAYWGQ |
| | | GTLVTVSS |
| 4.11 | 548 | QSVLTQPPSASGTPGQRVTISCSGSSSNIGSNYVYWYQQLPGTAPKLLIYRNN |
| | | QRPSGVPDRFSGSKSGTSASLAISGLRSEDEADYYCAAWDDSLSGLWVFGGG |
| | | TKLTVLGATPPETGAETESPGETTGGSAESEPPGEGQVQLQQWGGGLVKPGG |
| | | SLRLSCAASGFTFSSYSMNWVRQAPGKGLEWVSRINSDGSSTNYADSVKGRF |
| | | TISRDNAKNTLYLQMNSLRAEDTAVYYCARELRWGNWGQGTLVTVSS |
| 4.12 | 549 | QAGLTQPPSASGTPGQRVTLSCSGSYSNIGTYYVYWYQQLPGTAPKLLIYSN |
| | | DQRLSGVPDRFSGSKSGTSASLAISGLQSEDEAAYYCAAWDDSLNGWAFGG |
| | | GTKLTVLGATPPETGAETESPGETTGGSAESEPPGEGQVQLQQWGGGLVKPG |
| | | GSLRLSCAASGFTFSSYSMNWVRQAPGKGLEWVSRINSDGSSTNYADSVKG |
| | | RFTISRDNAKNTLYLQMNSLRAEDTAVYYCARELRWGNWGQGTLVTVSS |
| 4.13 | 550 | QPGLTQPPSASGTPGQRVTLSCSGRSSNIGSYYVYWYQHLPGMAPKLLIYRN |
| | | SRRPSGVPDRFSGSKSGTSASLVISGLQSDDEADYYCAAWDDSLKSWVFGGG |
| | | TKLTVLGATPPETGAETESPGETTGGSAESEPPGEGQVQLQQWGGGLVKPGG |
| | | SLRLSCAASGFTFSSYSMNWVRQAPGKGLEWVSRINSDGSSTNYADSVKGRF |
| | | TISRDNAKNTLYLQMNSLRAEDTAVYYCARELRWGNWGQGTLVTVSS |
| 4.14 | 551 | QSVLTQPPSASGTPGQRVTISCSGSSSNIGTNYVYWYQQFPGTAPKLLIYSNN |
| | | QRPSGVPDRFSGSKSGTSGSLAISGLQSEDEADYSCAAWDDSLNGWVFGGGT |
| | | KLTVLGATPPETGAETESPGETTGGSAESEPPGEGQVQLVQWGGGLVKPGGS |
| | | LRLSCAASGFTFSSYSMNWVRQAPGKGLEWVSRINSDGSSTNYADSVKGRF |
| | | TISRDNAKNTLYLQMNSLRAEDTAVYYCARELRWGNWGQGTLVTVSS |
| 4.15 | 552 | QPGLTQPPSASGTPGQRVTISCSGSSSNIGSNYVYWYQQLPGTAPKLLIYRNN |
| | | QRPSGVPDRLSGSKSGTSASLAISGLRSEDEADYYCAAWDDSLSGWVFGGGT |
| | | KLTVLGATPPETGAETESPGETTGGSAESEPPGEGQVQLVQWGGGLVKPGGS |
| | | LRLSCAASGFTFSSYSMNWVRQAPGKGLEWVSRINSDGSSTNYADSVKGRF |
| | | TISRDNAKNTLYLQMNSLRAEDTAVYYCARELRWGNWGQGTLVTVSS |
| 4.16 | 553 | QAVLTQPPSASGTPGQRVTISCSGSSSNIGSYYVYWYQQVPGAAPKLLMRLN |
| | | NQRPSGVPDRFSGAKSGTSASLVISGLRSEDEADYYCAAWDDSLSGQWVFG |
| | | GGTKLTVLGATPPETGAETESPGETTGGSAESEPPGEGQVQLQQWGGGLVKP |
| | | GGSLRLSCAASGFTFSSYSMNWVRQAPGKGLEWVSRINSDGSSTNYADSVK |
| | | GRFTISRDNAKNTLYLQMNSLRAEDTAVYYCARELRWGNWGQGTLVTVSS |
| 4.17 | 554 | QAGLTQPPSASGTPGQRVTISCSGSSSNIGSNYVYWYQQLPGTAPKLLIYRNN |
| | | QRPSGVPDRFSGSKSGTSASLAISGLRSEDEADYYCATWDASLSGWVFGGGT |
| | | KLTVLGATPPETGAETESPGETTGGSAESEPPGEGEVQLVQWGGGLVKPGGS |
| | | LRLSCAASGFTFSSYSMNWVRQAPGKGLEWVSRINSDGSSTNYADSVKGRF |
| | | TISRDNAKNTLYLQMNSLRAEDTAVYYCARELRWGNWGQGTLVTVSS |

### Tumor-Specific Markers or Antigens of Target Cells

[0309] In some embodiments of the compositions of this disclosure, the binding domain (e.g., the first binding domain) can have specific binding affinity to a tumor-specific marker or an antigen of a target cell. Some embodiments of the compositions of this disclosure can comprise another binding domain (e.g., the second binding domain) that binds to an effector cell antigen. The tumor-specific marker can be associated with a tumor cell (such as of stroma cell tumor, fibroblast tumor, myofibroblast tumor, glial cell tumor, epithelial cell tumor, fat cell tumor, immune cell tumor, vascular cell tumor, or smooth muscle cell tumor). The tumor-specific marker or the antigen of the target cell can be selected from the group consisting of alpha 4 integrin, Ang2, B7-H3, B7-H6 (e.g., its natural ligand Nkp30 rather than an antibody fragment), CEACAM5, cMET, CTLA4, FOLR1, EpCAM (epithelial cell adhesion molecule), CCR5, CD19, HER2, HER2 neu, HER3, HER4, HER1 (EGFR), PD-L1, PSMA, CEA, TROP-2, MUC1(mucin), MUC-2, MUC3, MUC4, MUC5AC, MUC5B, MUC7, MUC16, βhCG, Lewis-Y, CD20, CD33, CD38, CD30, CD56 (NCAM), CD133, ganglioside GD3, 9-O-acetyl-GD3, GM2, Globo H, fucosyl GM1, GD2, carbonicanhydrase IX, CD44v6, Nectin-4, Sonic Hedgehog (Shh), Wue-1, plasma cell antigen 1 (PC-1), melanoma chondroitin sulfate proteoglycan (MCSP), CCR8, 6-transmembrane epithelial antigen of prostate (STEAP), mesothelin, A33 antigen, prostate stem cell antigen (PSCA), Ly-6, desmoglein 4, fetal acetylcholine receptor (fnAChR), CD25, cancer antigen 19-9 (CA19-9), cancer antigen 125 (CA-125), Muellerian inhibitory substance receptor type II (MISIIR), sialylated Tn antigen (sTN), fibroblast activation antigen (FAP), endosialin (CD248), epidermal growth factor receptor variant III (EGFRvIII), tumor-associated antigen L6 (TAL6), SAS, CD63, TAG72, Thomsen-Friedenreich antigen (TF-antigen), insulin-like growth factor I receptor (IGF-IR), Cora antigen, CD7, CD22, CD70 (e.g., its natural ligand, CD27 rather than an antibody fragment), CD79a, CD79b, G250, MT-MMPs, alpha-fetoprotein (AFP), VEGFR1, VEGFR2, DLK1, SP17, ROR1, EphA2, ENPP3, glypican 3 (GPC3), and TPBG/5T4 (trophoblast glycoprotein). The tumor-specific marker or the antigen of the target cell can be selected from alpha 4 integrin, Ang2, CEACAM5, cMET, CTLA4, FOLR1, EpCAM (epithelial cell adhesion molecule), CD19, HER2, HER2 neu, HER3, HER4, HER1 (EGFR), PD-L1, PSMA, CEA, TROP-2, MUC1(mucin), Lewis-Y, CD20, CD33, CD38, mesothelin, CD70 (e.g., its natural ligand, CD27 rather than an antibody fragment), VEGFR1, VEGFR2, ROR1, EphA2, ENPP3, glypican 3 (GPC3), and TPBG/5T4 (trophoblast glycoprotein). The tumor-specific marker or the antigen of the target cell can be any one set forth in the “Target” column of Table 6. The binding domain with binding affinity to the tumor-specific marker or the target cell antigen can comprise VH and VL regions wherein each VH and VL regions can exhibit at least (about) 90%, or at least (about) 91%, or at least (about) 92%, or at least (about) 93%, or at least (about) 94%, or at least (about) 95%, or at least (about) 96%, or at least (about) 97%, or at least (about) 98%, or at least (about) 99%, or 100%, sequence identity to any one of the paired VL and VH sequences set forth in the “VH Sequences” and “VL Sequences” columns of Table 6.

TABLE 6
Anti-target Cell Monoclonal Antibodies and Sequences

| Trade | Antibody | | SEQ | | SEQ | |
|---|---|---|---|---|---|---|
| Name | Name | Target | ID NO: | VH Sequence | ID NO: | VL Sequence |
| Tysabri™ | natalizumab | Alpha | 555 | QVQLVQSGAEVKKPG | 654 | DIQMTQSPSSLSASVG |
| | | 4 | | ASVKVSCKASGFNIKD | | DRVTITCKTSQDINK |
| | | Integrin | | TYIHWVRQAPGQRLE | | YMAWYQQTPGKAPR |
| | | | | WMGRIDPANGYTKY | | LLIHYTSALQPGIPSR |
| | | | | DPKFQGRVTITADTSA | | FSGSGSGRDYTFTISS |
| | | | | STAYMELSSLRSEDTA | | LQPEDIATYYCLQYD |
| | | | | VYYCAREGYYGNYG | | NLWTFGQGTKVEIK |
| | | | | VYAMDYWGQGTLVT | | |
| | | | | VSS | | |
| REGN910 | nesvacumab | Ang2 | 556 | EVQLVESGGGLVQPGG | 655 | EIVLTQSPGTLSLSPG |
| | | | | SLRLSCAASGFTFSSY | | ERATLSCRASQSVSS |
| | | | | DIHWVRQATGKGLEW | | TYLAWYQQKPGQAP |
| | | | | VSAIGPAGDTYYPGSV | | RLLIYGASSRATGIPD |
| | | | | KGRFTISRENAKNSLY | | RFSGSGSGTDFTLTIS |
| | | | | LQMNSLRAGDTAVYY | | RLEPEDFAVYYCQH |
| | | | | CARGLITFGGLIAPFD | | YDNSQTFGQGTKVEI |
| | | | | YWGQGTLVTVSS | | K |
| hMFE23 | | CEA | 557 | QVKLEQSGAEVVKPG | 656 | ENVLTQSPSSMSASV |
| | | | | ASVKLSCKASGFNIKD | | GDRVNIACSASSSVS |
| | | | | SYMHWLRQGPGQRLE | | YMHWFQQKPGKSPK |
| | | | | WIGWIDPENGDTEYAP | | LWIYSTSNLASGVPS |
| | | | | KFQGKATFTTDTSANT | | RFSGSGSGTDYSLTIS |
| | | | | AYLGLSSLRPEDTAVY | | SMQPEDAATYYCQQ |
| | | | | YCNEGTPTGPYYFDY | | RSSYPLTFGGGTKLEI |
| | | | | WGQGTLVTVSS | | K |
| M5A | | CEA | 558 | EVQLVESGGGLVQPGG | 657 | DIQLTQSPSSLSASVG |
| (humanized | | | | SLRLSCAASGFNIKDT | | DRVTITCRAGESVDI |
| T84.66) | | | | YMHWVRQAPGKGLE | | FGVGFLHWYQQKPG |
| | | | | WVARIDPANGNSKYA | | KAPKLLIYRASNLES |
| | | | | DSVKGRFTISADTSKN | | GVPSRFSGSGSRTDFT |
| | | | | TAYLQMNSLRAEDTA | | LTISSLQPEDFATYYC |
| | | | | VYYCAPFGYYVSDYA | | QQTNEDPYTFGQGT |
| | | | | MAYWGQGTLVTVSS | | KVEIK |
| M5B | | CEA | 559 | EVQLVESGGGLVQPGG | 658 | DIQLTQSPSSLSASVG |
| (humanized | | | | SLRLSCAASGFNIKDT | | DRVTITCRAGESVDI |
| T84.66) | | | | YMHWVRQAPGKGLE | | FGVGFLHWYQQKPG |
| | | | | WVARIDPANGNSKYV | | KAPKLLIYRASNLES |
| | | | | PKFQGRATISADTSKN | | GVPSRFSGSGSRTDFT |
| | | | | TAYLQMNSLRAEDTA | | LTISSLQPEDFATYYC |
| | | | | VYYCAPFGYYVSDYA | | QQTNEDPYTFGQGT |
| | | | | MAYWGQGTLVTVSS | | KVEIK |
| CEA-Cide | Labetuzumab | CEAC | 560 | EVQLVESGGGVVQPG | 659 | DIQLTQSPSSLSASVG |
| | (MN-14) | AM5 | | RSLRLSCSASGFDFTTY | | DRVTITCKASQDVGT |
| | | | | WMSWVRQAPGKGLE | | SVAWYQQKPGKAPK |
| | | | | WIGEIHPDSSTINYAPS | | LLIYWTSTRHTGVPS |
| | | | | LKDRFTISRDNAKNTL | | RFSGSGSGTDFTFTIS |
| | | | | FLQMDSLRPEDTGVYF | | SLQPEDIATYYCQQY |
| | | | | CASLYFGFPWFAYWG | | SLYRSFGQGTKVEIK |
| | | | | QGTPVTVSS | | |
| CEA-Scan | arcitumomab | CEAC | 561 | EVKLVESGGGLVQPGG | 660 | QTVLSQSPAILSASPG |
| | | AM5 | | SLRLSCATSGFTFTDY | | EKVTMTCRASSSVTY |
| | | | | YMNWVRQPPGKALE | | IHWYQQKPGSSPKS |
| | | | | WLGFIGNKANGYTTE | | WIYATSNLASGVPAR |
| | | | | YSASVKGRFTISRDKS | | FSGSGSGTSYSLTISR |
| | | | | QSILYLQMNTLRAEDS | | VEAEDAATYYCQHW |
| | | | | ATYYCTRDRGLRFYF | | SSKPPTFGGGTKLEIK |
| | | | | DYWGQGTTLTVSS | | R |
| MT110 | | CEAC | 562 | EVQLVESGGGLVQPGR | 661 | QAVLTQPASLSASPG |
| | | AM5 | | SLRLSCAASGFTVSSY | | ASASLTCTLRRGINV |
| | | | | WMHWVRQAPGKGLE | | GAYSIYWYQQKPGSP |
| | | | | WVGFIRNKANGGTTE | | PQYLLRYKSDSDKQ |
| | | | | YAASVKGRFTISRDDS | | QGSGVSSRFSASKDA |
| | | | | KNTLYLQMNSLRAED | | SANAGILLISGLQSED |
| | | | | TAVYYCARDRGLRFY | | EADYYCMIWHSGAS |
| | | | | FDYWGQGTTVTVSS | | AVFGGGTKLTVL |
| MT103 | blinatumom | CD19 | 563 | QVQLQQSGAELVRPGS | 662 | DIQLTQSPASLAVSLG |
| | | | | SVKISCKASGYAFSSY | | QRATISCKASQSVDY |
| | | | | WMNWVKQRPGQGLE | | DGDSYLNWYQQIPG |
| | at | | | WIGQIWPGDGDTNYN | | QPPKLLIYDASNLVS |
| | | | | GKFKGKATLTADESSS | | GIPPRFSGSGSGTDFT |
| | | | | TAYMQLSSLASEDSAV | | LNIHPVEKVDAATYH |
| | | | | YFCARRETTTVGRYY | | CQQSTEDPWTFGGG |
| | | | | YAMDYWGQGTTVTVS | | TKLEIK |
| | | | | S | | |
| Arzerra | ofatumumab | CD20 | 564 | EVQLVESGGGLVQPGR | 663 | EIVLTQSPATLSLSPG |
| | | | | SLRLSCAASGFTFNDY | | ERATLSCRASQSVSS |
| | | | | AMHWVRQAPGKGLE | | YLAWYQQKPGQAPR |
| | | | | WVSTISWNSGSIGYAD | | LLIYDASNRATGIPAR |
| | | | | SVKGRFTISRDNAKKS | | FSGSGSGTDFTLTISS |
| | | | | LYLQMNSLRAEDTAL | | LEPEDFAVYYCQQRS |
| | | | | YYCAKDIQYGNYYYG | | NWPITFGQGTRLEIK |
| | | | | MDVWGQGTTVTVSS | | |
| Bexxar™ | tositumomab | CD20 | 565 | QAYLQQSGAELVRPG | 664 | QIVLSQSPAILSASPG |
| | | | | ASVKMSCKASGYTFTS | | EKVTMTCRASSSVSY |
| | | | | YNMHWVKQTPRQGLE | | MHWYQQKPGSSPKP |
| | | | | WIGAIYPGNGDTSYN | | WIYAPSNLASGVPAR |
| | | | | QKFKGKATLTVDKSS | | FSGSGSGTSYSLTISR |
| | | | | STAYMQLSSLTSEDSA | | VEAEDAATYYCQQW |
| | | | | VYFCARVVYYSNSYW | | SFNPPTFGAGTKLEL |
| | | | | YFDVWGTGTTVTVSG | | K |
| GAZYVA | Obinutuzumab | CD20 | 566 | QVQLVQSGAEVKKPG | 665 | DIVMTQTPLSLPVTPG |
| | | | | SSVKVSCKASGYAFSY | | EPASISCRSSKSLLHS |
| | | | | SWINWVRQAPGQGLE | | NGITYLYWYLQKPG |
| | | | | WMGRIFPGDGDTDYN | | QSPQLLIYQMSNLVS |
| | | | | GKFKGRVTITADKSTS | | GVPDRFSGSGSGTDF |
| | | | | TAYMELSSLRSEDTAV | | TLKISRVEAEDVGVY |
| | | | | YYCARNVFDGYWLV | | YCAQNLELPYTFGG |
| | | | | YWGQGTLVTVSS | | GTKVEIK |
| | Ocrelizuma | CD20 | 567 | EVQLVESGGGLVQPGG | 666 | DIQMTQSPSSLSASVG |
| | b/2H7 v16 | | | SLRLSCAASGYTFTSY | | DRVTITCRASSSVSY |
| | | | | NMHWVRQAPGKGLE | | MHWYQQKPGKAPKP |
| | | | | WVGAIYPGNGDTSYN | | LIYAPSNLASGVPSRF |
| | | | | QKFKGRFTISVDKSKN | | SGSGSGTDFTLTISSL |
| | | | | TLYLQMNSLRAEDTA | | QPEDFATYYCQQWS |
| | | | | VYYCARVVYYSNSYW | | FNPPTFGQGTKVEIK |
| | | | | YFDVWGQGTLVTVSS | | |
| Rituxan™ | rituximab | CD20 | 568 | QVQLQQPGAELVKPG | 667 | QIVLSQSPAILSASPG |
| | | | | ASVKMSCKASGYTFT | | EKVTMTCRASSSVSY |
| | | | | SYNMHWVKQTPGRGL | | IHWFQQKPGSSPKPW |
| | | | | EWIGAIYPGNGDTSYN | | IYATSNLASGVPVRFS |
| | | | | QKFKGKATLTADKSSS | | GSGSGTSYSLTISRVE |
| | | | | TAYMQLSSLTSEDSAV | | AEDAATYYCQQWTS |
| | | | | YYCARSTYYGGDWY | | NPPTFGGGTKLEIK |
| | | | | FNVWGAGTTVTVSA | | |
| Zevalin™ | ibritumomab | CD20 | 569 | QAYLQQSGAELVRPG | 668 | QIVLSQSPAILSASPG |
| | tieuxetan | | | ASVKMSCKASGYTFT | | EKVTMTCRASSSVSY |
| | | | | SYNMHWVKQTPRQGL | | MHWYQQKPGSSPKP |
| | | | | EWIGAIYPGNGDTSYN | | WIYAPSNLASGVPAR |
| | | | | QKFKGKATLTVDKSSS | | FSGSGSGTSYSLTISR |
| | | | | TAYMQLSSLTSEDSAV | | VEAEDAATYYCQQW |
| | | | | YFCARVVYYSNSYWY | | SFNPPTFGAGTKLEL |
| | | | | FDVWGTGTTVTVSA | | K |
| Mylotarg | Gemtuzumab | CD33 | 570 | QLVQSGAEVKKPGSSV | 669 | DIQLTQSPSTLSASVG |
| | (hP67.6) | | | KVSCKASGYTITDSNI | | DRVTITCRASESLDN |
| | | | | HWVRQAPGQSLEWIG | | YGIRFLTWFQQKPG |
| | | | | YIYPYNGGTDYNQKF | | KAPKLLMYAASNQG |
| | | | | KNRATLTVDNPTNTA | | SGVPSRFSGSGSGTEF |
| | | | | YMELSSLRSEDTDFYY | | TLTISSLQPDDFATYY |
| | | | | CVNGNPWLAYWGQG | | CQQTKEVPWSFGQG |
| | | | | TLVTVSS | | TKVEVK |
| Daratumumab | | CD38 | 571 | EVQLLESGGGLVQPGG | 670 | EIVLTQSPATLSLSPG |
| | | | | SLRLSCAVSGFTFNSF | | ERATLSCRASQSVSS |
| | | | | AMSWVRQAPGKGLE | | YLAWYQQKPGQAPR |
| | | | | WVSAISGSGGGTYYA | | LLIYDASNRATGIPAR |
| | | | | DSVKGRFTISRDNSKN | | FSGSGSGTDFTLTISS |
| | | | | TLYLQMNSLRAEDTA | | LEPEDFAVYYCQQRS |
| | | | | VYFCAKDKILWFGEP | | NWPPTFGQGTKVEIK |
| | | | | VFDYWGQGTLVTVSS | | |
| | 1F6 | CD70 | 572 | QIQLVQSGPEVKKPGE | 671 | DIVLTQSPASLAVSLG |
| | | | | TVKISCKASGYTFTNY | | QRATISCRASKSVSTS |
| | | | | GMNWVKQAPGKGLK | | GYSFMHWYQQKPG |
| | | | | WMGWINTYTGEPTY | | QPPKLLIYLASNLESG |
| | | | | ADAFKGRFAFSLETSA | | VPARFSGSGSGTDFT |
| | | | | STAYLQINNLKNEDTA | | LNIHPVEEEDAATY |
| | | | | TYFCARDYGDYGMDY | | YCQHSREVPWTFGG |
| | | | | WGQGTSVTVSS | | GTKLEIK |
| | 2F2 | CD70 | 573 | QVQLQQSGTELMTPG | 672 | DIVLTQSPASLTVSLG |
| | | | | ASVTMSCKTSGYTFST | | QKTTISCRASKSVSTS |
| | | | | YWIEWVKQRPGHGLE | | GYSFMHWYQLKPGQ |
| | | | | WIGEILGPSGYTDYNE | | SPKLLIYLASDLPSGV |
| | | | | KFKAKATFTADTSSNT | | PARFSGSGSGTDFTL |
| | | | | AYMQLSSLASEDSAVY | | KIHPVEEEDAATY |
| | | | | YCARWDRLYAMDYW | | YCQHSREIPYTFGGG |
| | | | | GGGTSVTVSS | | TKLEIT |
| | 2H5 | CD70 | 574 | QVQLVESGGGVVQPG | 673 | EIVLTQSPATLSLSPG |
| | | | | RSLRLSCAASGFTFSSY | | ERATLSCRASQSVSS |
| | | | | IMHWVRQAPGKGLEW | | YLAWYQQKPGQAPR |
| | | | | VAVISYDGRNKYYAD | | LLIYDASNRATGIPAR |
| | | | | SVKGRFTISRDNSKNT | | FSGSGSGTDFTLTISS |
| | | | | LYLQMNSLRAED | | LEPEDFAVYYCQQ |
| | | | | TAVYYCARDTDGYDF | | RTNWPLTFGGGTKV |
| | | | | DYWGQGTLVTVSS | | EIK |
| | 10B4 | CD70 | 575 | QIQLVESGGGVVQPGR | 674 | AIQLTQSPSSLSASVG |
| | | | | SLRLSCAASGFTFGYY | | DRVTITCRASQGISSA |
| | | | | AMHWVRQAPGKGLE | | LAWYQQKPGKAPKF |
| | | | | WVAVISYDGSIKYYA | | LIYDASSLESGVPSRF |
| | | | | DSVKGRFTISRDNSKN | | SGSGSGTDFTLTISSL |
| | | | | TLYLQMNSLRAED | | QPEDFATYYCQQ |
| | | | | TAVYYCAREGPYSNY | | FNSYPFTFGPGTKVD |
| | | | | LDYWGQGTLVTVSS | | IK |
| | 8B5 | CD70 | 576 | QVQLVESGGGVVQPG | 675 | DIQMTQSPSSLSASVG |
| | | | | RSLRLSCATSGFTFSDY | | DRVTITCRASQGISS |
| | | | | GMHWVRQAPGKGLE | | WLAWYQQKPEKAPK |
| | | | | WVAVIWYDGSNKYY | | SLIYAASSLQSGVPSR |
| | | | | ADSVKGRFTISRDNSK | | FSGSGSGTDFTLTISS |
| | | | | KTLSLQMNSLRAED | | LQPEDFATYYCQQ |
| | | | | TAVYYCARDSIMVRG | | YNSYPLTFGGGTKVE |
| | | | | DYWGQGTLVTVSS | | IK |
| | 18E7 | CD70 | 577 | QVQLVESGGGVVQPG | 676 | DIQMTQSPSSLSASVG |
| | | | | RSLRLSCAASGFTFSD | | DRVTITCRASQGISS |
| | | | | HGMHWVRQAPGKGL | | WLAWYQQKPEKAPK |
| | | | | EWVAVIWYDGSNKY | | SLIYAASSLQSGVPSR |
| | | | | YADSVKGRFTISRDNS | | FSGSGSGTDFTLTISS |
| | | | | KNTLYLQMNSLRAED | | LQPEDFATYYCQQ |
| | | | | TAVYYCARDSIMVRG | | YNSYPLTFGGGTKVE |
| | | | | DYWGQGTLVTVSS | | IK |
| | 69A7 | CD70 | 578 | QVQLQESGPGLVKPSE | 677 | EIVLTQSPATLSLSPG |
| | | | | TLSLTCTVSGGSVSSD | | ERATLSCRASQSVSS |
| | | | | YYYWSWIRQPPGKGL | | YLAWYQQKPGQAPR |
| | | | | EWLGYIYYSGSTNYNP | | LLIFDASNRATGIPAR |
| | | | | SLKSRVTISVDTSKNQF | | FSGSGSGTDFTLTISS |
| | | | | SLKLRSVTTA | | LEPEDFAVYYCQQ |
| | | | | DTAVYYCARGDGDYG | | RSNWPLTFGGGTKV |
| | | | | GNCFDYWGQGTLVTV | | EIK |
| | | | | SS | | |
| CE- | | cMET | 579 | QVQLVQSGAEVKKPG | 678 | DIQMTQSPSSVSASV |
| 355621 | | | | ASVKVSCKASGYTFTS | | GDRVTITCRASQGIN |
| | | | | YGFSWVRQAPGQGLE | | TWLAWYQQKPGKA |
| | | | | WMGWISASNGNTYY | | PKLLIYAASSLKSGVP |
| | | | | AQKLQGRVTMTTDTS | | SRFSGSGSGTDFTLTI |
| | | | | TSTAYMELRSLRSDDT | | SSLQPEDFATYYCQQ |
| | | | | AVYYCARVYADYADY | | ANSFPLTFGGGTKVE |
| | | | | WGQGTLVTVSS | | IK |
| LY28753 | emibetuzumab | cMET | 580 | QVQLVQSGAEVKKPG | 679 | DIQMTQSPSSLSASVG |
| 58 | | | | ASVKVSCKASGYTFT | | DRVTITCSVSSSVSSI |
| | | | | DYYMHWVRQAPGQG | | YLHWYQQKPGKAPK |
| | | | | LEWMGRVNPNRRGTT | | LLIYSTSNLASGVPSR |
| | | | | YNQKFEGRVTMTTDTS | | FSGSGSGTDFTLTISS |
| | | | | TSTAYMELRSLRSDDT | | LQPEDFATYYCQVYS |
| | | | | AVYYCARANWLDYW | | GYPLTFGGGTKVEIK |
| | | | | GQGTTVTVSS | | |
| MetMAb | onartuzumab | cMET | 581 | EVQLVESGGGLVQPGG | 680 | DIQMTQSPSSLSASVG |
| | | | | SLRLSCAASGYTFTSY | | DRVTITCKSSQSLLY |
| | | | | WLHWVRQAPGKGLE | | TSSQKNYLAWYQQK |
| | | | | WVGMIDPSNSDTRFN | | PGKAPKLLIYWASTR |
| | | | | PNFKDRFTISADTSKN | | ESGVPSRFSGSGSGT |
| | | | | TAYLQMNSLRAEDTA | | DFTLTISSLQPEDFAT |
| | | | | VYYCATYRSYVTPLD | | YYCQQYYAYPWTFG |
| | | | | YWGQGTLVTVSS | | QGTKVEIK |
| | tremelimumab | CTLA | 582 | QVQLVESGGGVVQPG | 681 | DIQMTQSPSSLSASVG |
| | (CP-675206, | 4 | | RSLRLSCAASGFTFSS | | DRVTITCRASQSINSY |
| | or 11.2.1) | | | YGMHWVRQAPGKGL | | LDWYQQKPGKAPKL |
| | | | | EWVAVIWYDGSNKY | | LIYAASSLQSGVPSRF |
| | | | | YADSVKGRFTISRDNS | | SGSGSGTDFTLTISSL |
| | | | | KNTLYLQMNSLRAED | | QPEDFATYYCQQYY |
| | | | | TAVYYCARDPRGATL | | STPFTFGPGTKVEIK |
| | | | | YYYYYGMDVWGQGT | | |
| | | | | TVTVSS | | |
| Yervoy | Ipilimumab | CTLA | 583 | QVQLVESGGGVVQPG | 682 | EIVLTQSPGTLSLSPG |
| | 10D1 | 4 | | RSLRLSCAASGFTFSSY | | ERATLSCRASQSVGS |
| | | | | TMHWVRQAPGKGLE | | SYLAWYQQKPGQAP |
| | | | | WVTFISYDGNNKYYA | | RLLIYGAFSRATGIPD |
| | | | | DSVKGRFTISRDNSKN | | RFSGSGSGTDFTLTIS |
| | | | | TLYLQMNSLRAEDTAI | | RLEPEDFAVYYCQQ |
| | | | | YYCARTGWLGPFDY | | YGSSPWTFGQGTKV |
| | | | | WGQGTLVTVSS | | EIK |
| AGS16F | H16-7.8 | ENPP3 | 584 | QVQLQESGPGLVKPSQ | 683 | EIVLTQSPDFQSVTPK |
| | | | | TLSLTCTVSGGSISSGG | | EKVTITCRASQSIGIS |
| | | | | YYWSWIRQHPGKGLE | | LHWYQQKPDQSPKL |
| | | | | WIGIIYYSGSTYYNPSL | | LIKYASQSFSGVPSRF |
| | | | | KSRVTISVDTSKNQFSL | | SGSGSGTDFTLTINSL |
| | | | | KLNSVTAADTAVFYC | | EAEDAATYYCHQSR |
| | | | | ARVAIVTTIPGGMDV | | SFPWTFGQGTKVEIK |
| | | | | WGQGTTVTVSS | | |
| MT110 | solitomab | EpCA | 585 | EVQLLEQSGAELVRPG | 684 | ELVMTQSPSSLTVTA |
| | | M | | TSVKISCKASGYAFTN | | GEKVTMSCKSSQSLL |
| | | | | YWLGWVKQRPGHGL | | NSGNQKNYLTWYQ |
| | | | | EWIGDIFPGSGNIHYN | | QKPGQPPKLLIYWAS |
| | | | | EKFKGKATLTADKSSS | | TRESGVPDRFTGSGS |
| | | | | TAYMQLSSLTFEDSAV | | GTDFTLTISSVQAEDL |
| | | | | YFCARLRNWDEPMD | | AVYYCQNDYSYPLT |
| | | | | YWGQGTTVTVSS | | FGAGTKLEIK |
| MT201 | Adecatumumab | EpCA | 586 | EVQLLESGGGVVQPGR | 685 | ELQMTQSPSSLSASV |
| | | M | | SLRLSCAASGFTFSSYG | | GDRVTITCRTSQSISS |
| | | | | MHWVRQAPGKGLEW | | YLNWYQQKPGQPPK |
| | | | | VAVISYDGSNKYYAD | | LLIYWASTRESGVPD |
| | | | | SVKGRFTISRDNSKNT | | RFSGSGSGTDFTLTIS |
| | | | | LYLQMNSLRAEDTAV | | SLQPEDSATYYCQQS |
| | | | | YYCAKDMGWGSGW | | YDIPYTFGQGTKLEI |
| | | | | RPYYYYGMDVWGQG | | K |
| | | | | TTVTVSS | | |
| Panorex | Edrecolomab | EpCA | 587 | QVQLQQSGAELVRPGT | 686 | NIVMTQSPKSMSMSV |
| | Mab CO17- | M | | SVKVSCKASGYAFTN | | GERVTLTCKASENVV |
| | 1A | | | YLIEWVKQRPGQGLE | | TYVSWYQQKPEQSP |
| | | | | WIGVINPGSGGTNYNE | | KLLIYGASNRYTGVP |
| | | | | KFKGKATLTADKSSST | | DRFTGSGSATDFTLTI |
| | | | | AYMQLSSLTSDDSAVY | | SSVQAEDLADYHCG |
| | | | | FCARDGPWFAYWGQ | | QGYSYPYTFGGGTK |
| | | | | GTLVTVSA | | LEIK |
| | tucotuzumab | EpCA | 588 | QIQLVQSGPELKKPGE | 687 | QILLTQSPAIMSASPG |
| | | M | | TVKISCKASGYTFTNY | | EKVTMTCSASSSVSY |
| | | | | GMNWVRQAPGKGLK | | MLWYQQKPGSSPKP |
| | | | | WMGWINTYTGEPTY | | WIFDTSNLASGFPAR |
| | | | | ADDFKGRFVFSLETSA | | FSGSGSGTSYSLIISSM |
| | | | | STAFLQLNNLRSEDTA | | EAEDAATYYCHQRS |
| | | | | TYFCVRFISKGDYWGQ | | GYPYTFGGGTKLEIK |
| | | | | GTSVTVSS | | |
| UBS-54 | | EpCA | 589 | VQLQQSDAELVKPGAS | 688 | DIVMTQSPDSLAVSL |
| | | M | | VKISCKASGYTFTDHA | | GERATINCKSSQSVL |
| | | | | IHWVKQNPEQGLEWI | | YSSNNKNYLAWYQQ |
| | | | | GYFSPGNDDFKYNER | | KPGQPPKLLIYWAST |
| | | | | FKGKATLTADKSSSTA | | RESGVPDRFSGSGSG |
| | | | | YVQLNSLTSEDSAVYF | | TDFTLTISSLQAEDVA |
| | | | | CTRSLNMAYWGQGTS | | VYYCQQYYSYPLTF |
| | | | | VTVSS | | GGGTKVKES |
| 3622W94 | 323/A3 | EpCA | 590 | EVQLVQSGPEVKKPGA | 689 | DIVMTQSPLSLPVTPG |
| | | M | | SVKVSCKASGYTFTN | | EPASISCRSSINKKGS |
| | | | | YGMNWVRQAPGQGL | | NGITYLYWYLQKPG |
| | | | | EWMGWINTYTGEPTY | | QSPQLLIYQMSNLAS |
| | | | | GEDFKGRFAFSLDTSA | | GVPDRFSGSGSGTDF |
| | | | | STAYMELSSLRSEDTA | | TLKISRVEAEDVGVY |
| | | | | VYFCARFGNYVDYWG | | YCAQNLEIPRTFGQG |
| | | | | QGSLVTVSS | | TKVEIK |
| 4D5MOC | | EpCA | 591 | EVQLVQSGPGLVQPGG | 690 | DIQMTQSPSSLSASVG |
| Bv2 | | M | | SVRISCAASGYTFTNY | | DRVTITCRSTKSLLH |
| | | | | GMNWVKQAPGKGLE | | SNGITYLYWYQQKP |
| | | | | WMGWINTYTGESTY | | GKAPKLLIYQMSNLA |
| | | | | ADSFKGRFTFSLDTSA | | SGVPSRFSSSGSGTDF |
| | | | | SAAYLQINSLRAEDTA | | TLTISSLQPEDFATYY |
| | | | | VYYCARFAIKGDYWG | | CAQNLEIPRTFGQGT |
| | | | | QGTLLTVSS | | KVEIK |
| 4D5MOC | | EpCA | 592 | EVQLVQSGPGLVQPGG | 691 | DIQMTQSPSSLSASVG |
| B | | M | | SVRISCAASGYTFTNY | | DRVTITCRSTKSLLH |
| | | | | GMNWVKQAPGKGLE | | SNGITYLYWYQQKP |
| | | | | WMGWINTYTGESTY | | GKAPKLLIYQMSNLA |
| | | | | ADSFKGRFTFSLDTSA | | SGVPSRFSSSGSGTDF |
| | | | | SAAYLQINSLRAEDTA | | TLTISSLQPEDFATYY |
| | | | | VYYCARFAIKGDYWG | | CAQNLEIPRTFGQGT |
| | | | | QGTLLTVSS | | KVELK |
| MEDI- | 1C1 | EphA2 | 593 | EVQLLESGGGLVQPGG | 692 | DIQMTQSPSSLSASVG |
| 547 | | | | SLRLSCAASGFTFSHY | | DRVTITCRASQSIST |
| | | | | MMAWVRQAPGKGLE | | WLAWYQQKPGKAP |
| | | | | WVSRIGPSGGPTHYA | | KLLIYKASNLHTGVP |
| | | | | DSVKGRFTISRDNSKN | | SRFSGSGSGTEFSLTIS |
| | | | | TLYLQMNSLRAEDTA | | GLQPDDFATYYCQQ |
| | | | | VYYCAGYDSGYDYVA | | YNSYSRTFGQGTKVE |
| | | | | VAGPAEYFQHWGQG | | IK |
| | | | | TLVTVSS | | |
| MORAb- | farletuzumab | FOLR1 | 594 | EVQLVESGGGVVQPG | 693 | DIQLTQSPSSLSASVG |
| 003 | | | | RSLRLSCSASGFTFSG | | DRVTITCSVSSSISSN |
| | | | | YGLSWVRQAPGKGLE | | NLHWYQQKPGKAPK |
| | | | | WVAMISSGGSYTYYA | | PWIYGTSNLASGVPS |
| | | | | DSVKGRFAISRDNAKN | | RFSGSGSGTDYTFTIS |
| | | | | TLFLQMDSLRPEDTGV | | SLQPEDIATYYCQQW |
| | | | | YFCARHGDDPAWFAY | | SSYPYMYTFGQGTK |
| | | | | WGQGTPVTVSS | | VEIK |
| M9346A | huMOV19 | FOLR1 | 595 | QVQLVQSGAEVVKPG | 694 | DIVLTQSPLSLAVSLG |
| | (vLCv1.00) | | | ASVKISCKASGYTFTG | | QPAIISCKASQSVSFA |
| | | | | YFMNWVKQSPGQSLE | | GTSLMHWYHQKPG |
| | | | | WIGRIHPYDGDTFYN | | QQPRLLIYRASNLEA |
| | | | | QKFQGKATLTVDKSS | | GVPDRFSGSGSKTDF |
| | | | | NTAHMELLSLTSEDFA | | TLNISPVEAEDAATY |
| | | | | VYYCTRYDGSRAMDY | | YCQQSREYPYTFGG |
| | | | | WGQGTTVTVSS | | GTKLEIK |
| M9346A | huMOV19 | FOLR1 | 596 | QVQLVQSGAEVVKPG | 695 | DIVLTQSPLSLAVSLG |
| | (vLCv1.60) | | | ASVKISCKASGYTFTG | | QPAIISCKASQSVSFA |
| | | | | YFMNWVKQSPGQSLE | | GTSLMHWYHQKPG |
| | | | | WIGRIHPYDGDTFYN | | QQPRLLIYRASNLEA |
| | | | | QKFQGKATLTVDKSS | | GVPDRFSGSGSKTDF |
| | | | | NTAHMELLSLTSEDFA | | TLTISPVEAEDAATY |
| | | | | VYYCTRYDGSRAMDY | | YCQQSREYPYTFGG |
| | | | | WGQGTTVTVSS | | GTKLEIK |
| 26B3.F2 | | FOLR1 | 597 | GPELVKPGASVKISCK | 696 | PASLSASVGETVTITC |
| | | | | ASDYSFTGYFMNWVM | | RTSENIFSYLAWYQQ |
| | | | | QSHGKSLEWIGRIFPY | | KQGISPQLLVYNAKT |
| | | | | NGDTFYNQKFKGRAT | | LAEGVPSRFSGSGSG |
| | | | | LTVDKSSSTAHMELRS | | TQFSLKINSLQPEDFG |
| | | | | LASEDSAVYFCARGTH | | SYYCQHHYAFPWTF |
| | | | | YFDYWGQGTTLTVSS | | GGGSKLEIK |
| RG7686 | GC33 | GPC3 | 598 | QVQLVQSGAEVKKPG | 697 | DVVMTQSPLSLPVTP |
| | | | | ASVKVSCKASGYTFTD | | GEPASISCRSSQSLVH |
| | | | | YEMHWVRQAPGQGL | | SNGNTYLHWYLQKP |
| | | | | EWMGALDPKTGDTA | | GQSPQLLIYKVSNRF |
| | | | | YSQKFKGRVTLTADK | | SGVPDRFSGSGSGTD |
| | | | | STSTAYMELSSLTSED | | FTLKISRVEAEDVGV |
| | | | | TAVYYCTRFYSYTYW | | YYCSQNTHVPPTFG |
| | | | | GQGTLVTVSS | | QGTKLEIK |
| | 4A6 | GPC3 | 599 | EVQLVQSGAEVKKPGE | 698 | EIVLTQSPGTLSLSPG |
| | | | | SLKISCKGSGYSFTSY | | ERATLSCRAVQSVSS |
| | | | | WIAWVRQMPGKGLE | | SYLAWYQQKPGQAP |
| | | | | WMGIIFPGDSDTRYSP | | RLLIYGASSRATGIPD |
| | | | | SFQGQVTISADRSIRTA | | RFSGSGSGTDFTLTIS |
| | | | | YLQWSSLKASD | | RLEPEDFAVYYCQ |
| | | | | TALYYCARTREGYFD | | QYGSSPTFGGGTKVE |
| | | | | YWGQGTLVTVSS | | IK |
| | 11E7 | GPC3 | 600 | EVQLVQSGAEVKKPGE | 699 | EIVLTQSPGTLSLSPG |
| | | | | SLKISCKGSGYSFTNY | | ERATLSCRASQSVSS |
| | | | | WIAWVRQMPGKGLE | | SYLAWYQQKPGQAP |
| | | | | WMGIIYPGDSDTRYSP | | RLLIYGASSRATGIPD |
| | | | | SFQGQVTISADKSIRTA | | RFSGSGSGTDFTLTIS |
| | | | | YLQWSSLKASD | | RLEPEDFAVYYCQ |
| | | | | TAMYYCARTREGYFD | | QYGSSPTFGGGTKVE |
| | | | | YWGQGTLVTVSS | | IK |
| | 16D10 | GPC3 | 601 | EVQLVQSGADVTKPGE | 700 | EILLTQSPGTLSLSPG |
| | | | | SLKISCKVSGYRFTNY | | ERATLSCRASQSVSS |
| | | | | WIGWMRQMSGKGLE | | SYLAWYQQKPGQAP |
| | | | | WMGIIYPGDSDTRYSP | | RLLIYGASSRATGIPD |
| | | | | SFQGHVTISADKSINTA | | RFSGSGSGTDFTLTIS |
| | | | | YLRWSSLKASD | | RLEPEDFAVYYCQ |
| | | | | TAIYYCARTREGFFDY | | QYGSSPTFGQGTKVE |
| | | | | WGQGTPVTVSS | | IK |
| AMG-595 | | HER1 | 602 | QVQLVESGGGVVQSG | 701 | DTVMTQTPLSSHVTL |
| | | (EGFR) | | RSLRLSCAASGFTFRN | | GQPASISCRSSQSLV |
| | | | | YGMHWVRQAPGKGL | | HSDGNTYLSWLQQR |
| | | | | EWVAVIWYDGSDKY | | PGQPPRLLIYRISRRF |
| | | | | YADSVRGRFTISRDNS | | SGVPDRFSGSGAGTD |
| | | | | KNTLYLQMNSLRAED | | FTLEISRVEAEDVGV |
| | | | | TAVYYCARDGYDILT | | YYCMQSTHVPRTFG |
| | | | | GNPRDFDYWGQGTLV | | QGTKVEIK |
| | | | | TVSS | | |
| Erubitux™ | cetutximab | HER1 | 603 | QVQLKQSGPGLVQPSQ | 702 | DILLTQSPVILSVSPGE |
| | | (EGFR) | | SLSITCTVSGFSLTNYG | | RVSFSCRASQSIGTNI |
| | | | | VHWVRQSPGKGLEWL | | HWYQQRTNGSPRLLI |
| | | | | GVIWSGGNTDYNTPF | | KYASESISGIPSRFSGS |
| | | | | TSRLSINKDNSKSQVFF | | GSGTDFTLSINSVESE |
| | | | | KMNSLQSNDTAIYYCA | | DIADYYCQQNNNWP |
| | | | | RALTYYDYEFAYWGQ | | TTFGAGTKLELK |
| | | | | GTLVTVSA | | |
| GA201 | Imgatuzumab | HER1 | 604 | QVQLVQSGAEVKKPG | 703 | DIQMTQSPSSLSASVG |
| | | (EGFR) | | SSVKVSCKASGFTFTD | | DRVTITCRASQGINN |
| | | | | YKIHWVRQAPGQGLE | | YLNWYQQKPGKAPK |
| | | | | WMGYFNPNSGYSTYA | | RLIYNTNNLQTGVPS |
| | | | | QKFQGRVTITADKSTS | | RFSGSGSGTEFTLTISS |
| | | | | TAYMELSSLRSEDTAV | | LQPEDFATYYCLQH |
| | | | | YYCARLSPGGYYVMD | | NSFPTFGQGTKLEIK |
| | | | | AWGQGTTVTVSS | | |
| Humax | zalutumumab | HER1 | 605 | QVQLVESGGGVVQPG | 704 | AIQLTQSPSSLSASVG |
| | | (EGFR) | | RSLRLSCAASGFTFSTY | | DRVTITCRASQDISSA |
| | | | | GMHWVRQAPGKGLE | | LVWYQQKPGKAPKL |
| | | | | WVAVIWDDGSYKYY | | LIYDASSLESGVPSRF |
| | | | | GDSVKGRFTISRDNSK | | SGSESGTDFTLTISSL |
| | | | | NTLYLQMNSLRAEDT | | QPEDFATYYCQQFNS |
| | | | | AVYYCARDGITMVRG | | YPLTFGGGTKVEIK |
| | | | | VMKDYFDYWGQGTL | | |
| | | | | VTVSS | | |
| IMC-11F8 | necitumumab | HER1 | 606 | QVQLQESGPGLVKPSQ | 705 | EIVMTQSPATLSLSPG |
| | | (EGFR) | | TLSLTCTVSGGSISSGD | | ERATLSCRASQSVSS |
| | | | | YYWSWIRQPPGKGLE | | YLAWYQQKPGQAPR |
| | | | | WIGYIYYSGSTDYNPS | | LLIYDASNRATGIPAR |
| | | | | LKSRVTMSVDTSKNQF | | FSGSGSGTDFTLTISS |
| | | | | SLKVNSVTAADTAVY | | LEPEDFAVYYCHQY |
| | | | | YCARVSIFGVGTFDY | | GSTPLTFGGGTKAEI |
| | | | | WGQGTLVTVSS | | K |
| MM-151 | PIX | HER1 | 607 | QVQLVQSGAEVKKPG | 706 | DIQMTQSPSTLSASV |
| | | (EGFR) | | SSVKVSCKASGGTFSS | | GDRVTITCRASQSISS |
| | | | | YAISWVRQAPGQGLE | | WWAWYQQKPGKAP |
| | | | | WMGSIIPIFGTVNYAQ | | KLLIYDASSLESGVPS |
| | | | | KFQGRVTITADESTST | | RFSGSGSGTEFTLTISS |
| | | | | AYMELSSLRSEDTAVY | | LQPDDFATYYCQQY |
| | | | | YCARDPSVNLYWYFD | | HAHPTTFGGGTKVEI |
| | | | | LWGRGTLVTVSS | | K |
| MM-151 | P2X | HER1 | 608 | QVQLVQSGAEVKKPG | 707 | DIVMTQSPDSLAVSL |
| | | (EGFR) | | SSVKVSCKASGGTFGS | | GERATINCKSSQSVL |
| | | | | YAISWVRQAPGQGLE | | YSPNNKNYLAWYQQ |
| | | | | WMGSIIPIFGAANPAQ | | KPGQPPKLLIYWAST |
| | | | | KSQGRVTITADESTST | | RESGVPDRFSGSGSG |
| | | | | AYMELSSLRSEDTAVY | | TDFTLTISSLQAEDVA |
| | | | | YCAKMGRGKVAFDI | | VYYCQQYYGSPITFG |
| | | | | WGQGTMVTVSS | | GGTKVEIK |
| MM-151 | P3X | HER1 | 609 | QVQLVQSGAEVKKPG | 708 | EIVMTQSPATLSVSPG |
| | | (EGFR) | | ASVKVSCKASGYAFTS | | ERATLSCRASQSVSS |
| | | | | YGINWVRQAPGQGLE | | NLAWYQQKPGQAPR |
| | | | | WMGWISAYNGNTYY | | LLIYGASTRATGIPAR |
| | | | | AQKLRGRVTMTTDTS | | FSGSGSGTEFTLTISSL |
| | | | | TSTAYMELRSLRSDDT | | QSEDFAVYYCQDYR |
| | | | | AVYYCARDLGGYGSG | | TWPRRVFGGGTKVE |
| | | | | SVPFDPWGQGTLVTVSS | | IK |
| TheraCIM | nimotuzumab | HER1 | 610 | QVQLQQSGAEVKKPG | 709 | DIQMTQSPSSLSASVG |
| | | (EGFR) | | SSVKVSCKASGYTFTN | | DRVTITCRSSQNIVHS |
| | | | | YYIYWVRQAPGQGLE | | NGNTYLDWYQQTPG |
| | | | | WIGGINPTSGGSNFNE | | KAPKLLIYKVSNRFS |
| | | | | KFKTRVTITADESSTT | | GVPSRFSGSGSGTDFT |
| | | | | AYMELSSLRSEDTAFY | | FTISSLQPEDIATYYC |
| | | | | FCTRQGLWFDSDGRG | | FQYSHVPWTFGQGT |
| | | | | FDFWGQGTTVTVSS | | KLQIT |
| Vectibix™ | panitumimab | HER1 | 611 | QVQLQESGPGLVKPSE | 710 | DIQMTQSPSSLSASVG |
| | | (EGFR) | | TLSLTCTVSGGSVSSG | | DRVTITCQASQDISN |
| | | | | DYYWTWIRQSPGKGL | | YLNWYQQKPGKAPK |
| | | | | EWIGHIYYSGNTNYNP | | LLIYDASNLETGVPSR |
| | | | | SLKSRLTISIDTSKTQFS | | FSGSGSGTDFTFTISSL |
| | | | | LKLSSVTAADTAIYYC | | QPEDIATYFCQHFDH |
| | | | | VRDRVTGAFDIWGQG | | LPLAFGGGTKVEIK |
| | | | | TMVTVSS | | |
| 07D06 | | HER1 | 612 | QIQLVQSGPELKKPGE | 711 | DVVMTQTPLSLPVSL |
| | | (EGFR) | | TVKISCKASGYTFTEY | | GDQASISCRSSQSLV |
| | | | | PIHWVKQAPGKGFKW | | HSNGNTYLHWYLQK |
| | | | | MGMIYTDIGKPTYAE | | PGQSPKLLIYKVSNR |
| | | | | EFKGRFAFSLETSASTA | | FSGVPDRFSGSGSGT |
| | | | | YLQINNLKNEDTATYF | | DFTLKISRVEAEDLG |
| | | | | CVRDRYDSLFDYWGQ | | VYFCSQSTHVPWTF |
| | | | | GTTLTVSS | | GGGTKLEIK |
| 12D03 | | HER1 | 613 | EMQLVESGGGFVKPG | 712 | DVVMTQTPLSLPVSL |
| | | (EGFR) | | GSLKLSCAASGFAFSH | | GDQASISCRSSQSLV |
| | | | | YDMSWVRQTPKQRLE | | HSNGNTYLHWYLQK |
| | | | | WVAYIASGGDITYYA | | PGQSPKLLIYKVSNR |
| | | | | DTVKGRFTISRDNAQN | | FSGVPDRFSGSGSGT |
| | | | | TLYLQMSSLKSEDTAM | | DFTLKISRVEAEDLG |
| | | | | FYCSRSSYGNNGDAL | | VYFCSQSTHVLTFGS |
| | | | | DFWGQGTSVTVSS | | GTKLEIK |
| | C1 | HER2 | 614 | QVQLVESGGGLVQPG | 713 | QSPSFLSAFVGDRITIT |
| | | | | GSLRLSCAASGFTFSSY | | CRASPGIRNYLAWY |
| | | | | AMGWVRQAPGKGLE | | QQKPGKAPKLLIYAA |
| | | | | WVSSISGSSRYIYYAD | | STLQSGVPSRFSGSGS |
| | | | | SVKGRFTISRDNSKNT | | GTDFTLTISSLQPEDF |
| | | | | LYLQMNSLRAEDTAV | | ATYYCQQYNSYPLSF |
| | | | | YYCAKMDASGSYFNF | | GGGTKVEIK |
| | | | | WGQGTLVTVSS | | |
| Erbicin | | HER2 | 615 | QVQLLQSAAEVKKPGE | 714 | QAVVTQEPSFSVSPG |
| | | | | SLKISCKGSGYSFTSY | | GTVTLTCGLSSGSVS |
| | | | | WIGWVRQMPGKGLE | | TSYYPSWYQQTPGQ |
| | | | | WMGIIYPGDSDTRYSP | | APRTLIYSTNTRSSGV |
| | | | | SFQGQVTISADKSISTA | | PDRFSGSILGNKAALT |
| | | | | YLQWSSLKASDTAVY | | ITGAQADDESDYYCV |
| | | | | YCARWRDSPLWGQGT | | LYMGSGQYVFGGGT |
| | | | | LVTVSS | | KLTVL |
| Herceptin | trastuzumab | HER2 | 616 | EVQLVESGGGLVQPGG | 715 | DIQMTQSPSSLSASVG |
| | | | | SLRLSCAASGFNIKDT | | DRVTITCRASQDVNT |
| | | | | YIHWVRQAPGKGLEW | | AVAWYQQKPGKAPK |
| | | | | VARIYPTNGYTRYADS | | LLIYSASFLYSGVPSR |
| | | | | VKGRFTISADTSKNTA | | FSGSRSGTDFTLTISSL |
| | | | | YLQMNSLRAEDTAVY | | QPEDFATYYCQQHY |
| | | | | YCSRWGGDGFYAMD | | TTPPTFGQGTKVEIK |
| | | | | YWGQGTLVTVSS | | |
| MAGH22 | margetuximab | HER2 | 617 | QVQLQQSGPELVKPGA | 716 | DIVMTQSHKFMSTSV |
| | | | | SLKLSCTASGFNIKDT | | GDRVSITCKASQDVN |
| | | | | YIHWVKQRPEQGLEWI | | TAVAWYQQKPGHSP |
| | | | | GRIYPTNGYTRYDPKF | | KLLIYSASFRYTGVPD |
| | | | | QDKATITADTSSNTAY | | RFTGSRSGTDFTFTIS |
| | | | | LQVSRLTSEDTAVYYC | | SVQAEDLAVYYCQQ |
| | | | | SRWGGDGFYAMDYW | | HYTTPPTFGGGTKVE |
| | | | | GQGASVTVSS | | IK |
| MM-302 | F5 | HER2 | 618 | QVQLVESGGGLVQPG | 717 | QSVLTQPPSVSGAPG |
| | | | | GSLRLSCAASGFTFRSY | | QRVTISCTGSSSNIGA |
| | | | | AMSWVRQAPGKGLE | | GYGVHWYQQLPGTA |
| | | | | WVSAISGRGDNTYYA | | PKLLIYGNTNRPSGV |
| | | | | DSVKGRFTISRDNSKN | | PDRFSGFKSGTSASLA |
| | | | | TLYLQMNSLRAEDTA | | ITGLQAEDEADYYCQ |
| | | | | VYYCAKMTSNAFAFD | | FYDSSLSGWVFGGG |
| | | | | YWGQGTLVTVSS | | TKLTVL |
| Perjeta | pertuzumab | HER2 | 619 | EVQLVESGGGLVQPGG | 718 | DIQMTQSPSSLSASVG |
| | | | | SLRLSCAASGFTFTDY | | DRVTITCKASQDVSI |
| | | | | TMDWVRQAPGKGLE | | GVAWYQQKPGKAPK |
| | | | | WVADVNPNSGGSIYN | | LLIYSASYRYTGVPSR |
| | | | | QRFKGRFTLSVDRSKN | | FSGSGSGTDFTLTISS |
| | | | | TLYLQMNSLRAEDTA | | LQPEDFATYYCQQY |
| | | | | VYYCARNLGPSFYFD | | YIYPYTFGQGTKVEI |
| | | | | YWGQGTLVTVSS | | K |
| MM-121/ | | HER3 | 620 | EVQLLESGGGLVQPGG | 719 | QSALTQPASVSGSPG |
| SAR2562 | | | | SLRLSCAASGFTFSHY | | QSITISCTGTSSDVGS |
| 12 | | | | VMAWVRQAPGKGLE | | YNVVSWYQQHPGKA |
| | | | | WVSSISSSGGWTLYA | | PKLIIYEVSQRPSGVS |
| | | | | DSVKGRFTISRDNSKN | | NRFSGSKSGNTASLTI |
| | | | | TLYLQMNSLRAEDTA | | SGLQTEDEADYYCCS |
| | | | | VYYCTRGLKMATIFD | | YAGSSIFVIFGGGTK |
| | | | | YWGQGTLVTVSS | | VTVL |
| MEHD79 | Duligotumab | HER1 | 621 | EVQLVESGGGLVQPGG | 720 | DIQMTQSPSSLSASVG |
| 45A | | (EGFR)/ | | SLRLSCAASGFTLSGD | | DRVTITCRASQNIAT |
| | | HER3 | | WIHWVRQAPGKGLE | | DVAWYQQKPGKAPK |
| | | | | WVGEISAAGGYTDYA | | LLIYSASFLYSGVPSR |
| | | | | DSVKGRFTISADTSKN | | FSGSGSGTDFTLTISS |
| | | | | TAYLQMNSLRAEDTA | | LQPEDFATYYCQQSE |
| | | | | VYYCARESRVSFEAA | | PEPYTFGQGTKVEIK |
| | | | | MDYWGQGTLVTVSS | | |
| MM-111 | | HER2/ | 622 | QVQLQESGGGLVKPG | 721 | QSALTQPASVSGSPG |
| | | 3 | | GSLRLSCAASGFTFSSY | | QSITISCTGTSSDVGG |
| | | | | WMSWVRQAPGKGLE | | YNFVSWYQQHPGKA |
| | | | | WVANINRDGSASYYV | | PKLMIYDVSDRPSGV |
| | | | | DSVKGRFTISRDDAKN | | SDRFSGSKSGNTASLI |
| | | | | SLYLQMNSLRAEDTAV | | ISGLQADDEADYYCS |
| | | | | YYCARDRGVGYFDL | | SYGSSSTHVIFGGGT |
| | | | | WGRGTLVTVSS | | KVTVL |
| MM-111 | | HER2/ | 623 | QVQLVQSGAEVKKPG | 722 | QSVLTQPPSVSAAPGQ |
| | | 3 | | ESLKISCKGSGYSFTSY | | KVTISCSGSSSNIGNN |
| | | | | WIAWVRQMPGKGLEY | | YVSWYQQLPGTAPK |
| | | | | MGLIYPGDSDTKYSPS | | LLIYDHTNRPAGVPD |
| | | | | FQGQVTISVDKSVSTA | | RFSGSKSGTSASLAIS |
| | | | | YLQWSSLKPSDSAVYF | | GFRSEDEADYYCAS |
| | | | | CARHDVGYCTDRTCA | | WDYTLSGWVFGGG |
| | | | | KWPEWLGVWGQGTL | | TKLTVL |
| | | | | VTVSS | | |
| | Hu3S193 | Lewis- | 624 | EVQLVESGGGVVQPG | 723 | DIQMTQSPSSLSASVG |
| | | Y | | RSLRLSCSTSGFTFSDY | | DRVTITCRSSQRIVHS |
| | | | | YMYWVRQAPGKGLE | | NGNTYLEWYQQTPG |
| | | | | WVAYMSNVGAITDYP | | KAPKLLIYKVSNRFS |
| | | | | DTVKGRFTISRDNSKN | | GVPSRFSGSGSGTDFT |
| | | | | TLFLQMDSLRPEDTGV | | FTISSLQPEDIATYYC |
| | | | | YFCARGTRDGSWFAY | | FQGSHVPFTFGQGT |
| | | | | WGQGTPVTVSS | | KLQIT |
| BAY 94- | anetumab | Mesothelin | 625 | QVELVQSGAEVKKPGE | 724 | DIALTQPASVSGSPGQ |
| 9343 | ravtansine | | | SLKISCKGSGYSFTSY | | SITISCTGTSSDIGGY |
| | | | | WIGWVRQAPGKGLEW | | NSVSWYQQHPGKAP |
| | | | | MGIIDPGDSRTRYSPSF | | KLMIYGVNNRPSGVS |
| | | | | QGQVTISADKSISTAYL | | NRFSGSKSGNTASLTI |
| | | | | QWSSLKASDTAMYYC | | SGLQAEDEADYYCSS |
| | | | | ARGQLYGGTYMDGW | | YDIESATPVFGGGTK |
| | | | | GQGTLVTVSS | | LTVL |
| | SS1 | Mesothelin | 626 | QVQLQQSGPELEKPGA | 725 | DIELTQSPAIMSASPG |
| | | | | SVKISCKASGYSFTGYT | | EKVTMTCSASSSVSY |
| | | | | MNWVKQSHGKSLEWI | | MHWYQQKSGTSPKR |
| | | | | GLITPYNGASSYNQKF | | WIYDTSKLASGVPGR |
| | | | | RGKATLTVDKSSSTAY | | FSGSGSGNSYSLTISS |
| | | | | MDLLSLTSEDSAVYFC | | VEAEDDATYYCQQW |
| | | | | ARGGYDGRGFDYWGQ | | SGYPLTFGAGTKLEIK |
| | | | | GTTVTVSS | | |
| | | Mesothelin | 627 | QVYLVESGGGVVQPG | 726 | EIVLTQSPATLSLSPG |
| | | | | RSLRLSCAASGITFSIY | | ERATLSCRASQSVSS |
| | | | | GMHWVRQAPGKGLE | | YLAWYQQKPGQAPR |
| | | | | WVAVIWYDGSHEYY | | LLIYDASNRATGIPAR |
| | | | | ADSVKGRFTISRDNSK | | FSGSGSGTDFTLTISS7 |
| | | | | NTLYLLMNSLRAED | | LEPEDFAVYYCQQ |
| | | | | TAVYYCARDGDYYDS | | RSNWPLTFGGGTKV |
| | | | | GSPLDYWGQGTLVTV | | EIK |
| | | | | SS | | |
| | | Mesothelin | 628 | QVHLVESGGGVVQPG | 727 | EIVLTQSPATLSLSPG |
| | | | | RSLRLSCVASGITFRIY | | ERATLSCRASQSVSS |
| | | | | GMHWVRQAPGKGLE | | YLAWYQQKPGQAPR |
| | | | | WVAVLWYDGSHEYY | | LLIYDASNRATGIPAR |
| | | | | ADSVKGRFTISRDNSK | | FSGSGSGTDFTLTISS |
| | | | | NTLYLQMNSLRAED | | LEPEDFAVYYCQQ |
| | | | | TAIYYCARDGDYYDS | | RSNWPLTFGGGTKV |
| | | | | GSPLDYWGQGTLVTV | | EIK |
| | | | | SS | | |
| | | Mesothelin | 629 | EVHLVESGGGLVQPGG | 728 | EIVLTQSPGTLSLSPG |
| | | | | SLRLSCAASGFTFSRY | | ERATLSCRASQSVSS |
| | | | | WMSWVRQAQGKGLE | | SYLAWYQQKPGQAP |
| | | | | WVASIKQAGSEKTYV | | RLLIYGASSRATGIPD |
| | | | | DSVKGRFTISRDNAKN | | RFSGSGSGTDFTLTIS |
| | | | | SLSLQMNSLRAED | | RLEPEDFAVYYCQ |
| | | | | TAVYYCAREGAYYYD | | QYGSSQYTFGQGTK |
| | | | | SASYYPYYYYYSMDV | | LEIK |
| | | | | WGQGTTVTVSS | | |
| MORAb- | amatuximab | Mesothelin | 630 | QVQLQQSGPELEKPGA | 729 | DIELTQSPAIMSASPG |
| 009 | | | | SVKISCKASGYSFTGY | | EKVTMTCSASSSVSY |
| | | | | TMNWVKQSHGKSLE | | MHWYQQKSGTSPKR |
| | | | | WIGLITPYNGASSYNQ | | WIYDTSKLASGVPGR |
| | | | | KFRGKATLTVDKSSST | | FSGSGSGNSYSLTISS |
| | | | | AYMDLLSLTSEDSAVY | | VEAEDDATYYCQQW |
| | | | | FCARGGYDGRGFDY | | SKHPLTFGSGTKVEI |
| | | | | WGSGTPVTVSS | | K |
| hPAM4 | | MUC- | 631 | EVQLQESGPELVKPGA | 730 | DIVMTQSPAIMSASP |
| | | 1 | | SVKMSCKASGYTFPSY | | GEKVTMTCSASSSVS |
| | | | | VLHWVKQKPGQGLE | | SSYLYWYQQKPGSSP |
| | | | | WIGYINPYNDGTQYN | | KLWIYSTSNLASGVP |
| | | | | EKFKGKATLTSDKSSS | | ARFSGSGSGTSYSLTI |
| | | | | TAYMELSRLTSED | | SSMEAEDAASYFCH |
| | | | | SAVYYCARGFGGSYG | | QWNRYPYTFGGGTK |
| | | | | FAYWGQGTLITVSA | | LEIK |
| hPAM4- | clivatuzumab | MUC1 | 632 | QVQLQQSGAEVKKFG | 731 | DIQLTQSPSSLSASVG |
| Cide | | | | ASVKVSCEASGYTFPS | | DRVTMTCSASSSVSS |
| | | | | YVLHWVKQAPGQGLE | | SYLYWYQQKPGKAP |
| | | | | WIGYINPYNDGTQTN | | KLWIYSTSNLASGVP |
| | | | | KKFKGKATLTRDTSIN | | ARFSGSGSGTDFTLTI |
| | | | | TAYMELSRLRSDDTAV | | SSLQPEDSASYFCHQ |
| | | | | YYCARGFGGSYGFAY | | WNRYPYTFGGGTRL |
| | | | | NGQGTLVTVSS | | EIK |
| SAR5666 | huDS6v1.01 | MUC1 | 754 | QAQLQVSGAEVVKPG | 732 | EIVLTQSPATMSASPG |
| 58 | | | | ASVKMSCKASGYTFTS | | ERVTITCSAHSSVSF |
| | | | | YNMHWVKQTPGQGL | | MHWFQQKPGTSPKL |
| | | | | EWIGYIYPGNGATNY | | WIYSTSSLASGVPAR |
| | | | | NQKFQGKATLTADTS | | FGGSGSGTSYSLTISS |
| | | | | SSTAYMQISSLTSEDSA | | MEAEDAATYYCQQR |
| | | | | VYFCARGDSVPFAYW | | SSFPLTFGAGTKLEL |
| | | | | GQGTLVTVSA | | K |
| Theragyn | Pemtumomab | MUC1 | 633 | QVQLQQSGAELMKPG | 733 | DIVMSQSPSSLAVSV |
| | muHMFG1 | | | ASVKISCKATGYTFSA | | GEKVTMSCKSSQSLL |
| | | | | YWIEWVKQRPGHGLE | | YSSNQKIYLAWYQQ |
| | | | | WIGEILPGSNNSRYNE | | KPGQSPKLLIYWAST |
| | | | | KFKGKATFTADTSSNT | | RESGVPDRFTGGGSG |
| | | | | AYMQLSSLTSEDSAVY | | TDFTLTISSVKAEDLA |
| | | | | YCSRSYDFAWFAYWG | | VYYCQQYYRYPRTF |
| | | | | QGTPVTVSA | | GGGTKLEIK |
| Therex | Sontuzumab | MUC1 | 634 | QVQLVQSGAEVKKPG | 734 | DIQMTQSPSSLSASVG |
| | huHMFG1 | | | ASVKVSCKASGYTFSA | | DRVTITCKSSQSLLY |
| | AS1402 | | | YWIEWVRQAPGKGLE | | SSNQKIYLAWYQQK |
| | R1150 | | | WVGEILPGSNNSRYN | | PGKAPKLLIYWASTR |
| | | | | EKFKGRVTVTRDTST | | ESGVPSRFSGSGSGT |
| | | | | NTAYMELSSLRSEDTA | | DFTFTISSLQPEDIATY |
| | | | | VYYCARSYDFAWFAY | | YCQQYYRYPRTFGQ |
| | | | | WGQGTLVTVSS | | GTKVEIK |
| MDX- | | PD-L1 | 635 | QVQLVQSGAEVKKPG | 735 | EIVLTQSPATLSLSPG |
| 1105 or | | | | SSVKVSCKTSGDTFST | | ERATLSCRASQSVSS |
| BMS- | | | | YAISWVRQAPGQGLE | | YLAWYQQKPGQAPR |
| 936559 | | | | WMGGIIPIFGKAHYA | | LLIYDASNRATGIPAR |
| | | | | QKFQGRVTITADESTS | | FSGSGSGTDFTLTISS |
| | | | | TAYMELSSLRSEDTAV | | LEPEDFAVYYCQQRS |
| | | | | YFCARKFHFVSGSPFG | | NWPTFGQGTKVEIK |
| | | | | MDVWGQGTTVTVSS | | |
| MEDI- | durvalumab | PD-L1 | 636 | EVQLVESGGGLVQPGG | 736 | EIVLTQSPGTLSLSPG |
| 4736 | | | | SLRLSCAASGFTFSRY | | ERATLSCRASQRVSS |
| | | | | WMSWVRQAPGKGLE | | SYLAWYQQKPGQAP |
| | | | | WVANIKQDGSEKYYV | | RLLIYDASSRATGIPD |
| | | | | DSVKGRFTISRDNAKN | | RFSGSGSGTDFTLTIS |
| | | | | SLYLQMNSLRAEDTAV | | RLEPEDFAVYYCQQ |
| | | | | YYCAREGGWFGELA | | YGSLPWTFGQGTKV |
| | | | | FDYWGQGTLVTVSS | | EIK |
| MPDL328 | atezolizumab | PD-L1 | 637 | EVQLVESGGGLVQPGG | 737 | DIQMTQSPSSLSASVG |
| 0A | | | | SLRLSCAASGFTFSDS | | DRVTITCRASQDVST |
| | | | | WIHWVRQAPGKGLEW | | AVAWYQQKPGKAPK |
| | | | | VAWISPYGGSTYYAD | | LLIYSASFLYSGVPSR |
| | | | | SVKGRFTISADTSKNT | | FSGSGSGTDFTLTISS |
| | | | | AYLQMNSLRAEDTAV | | LQPEDFATYYCQQY |
| | | | | YYCARRHWPGGFDY | | LYHPATFGQGTKVEI |
| | | | | WGQGTLVTVSS | | K |
| MSB0010 | avelumab | PD-L1 | 638 | EVQLLESGGGLVQPGG | 738 | QSALTQPASVSGSPG |
| 718C | | | | SLRLSCAASGFTFSSYI | | QSITISCTGTSSDVGG |
| | | | | MMWVRQAPGKGLEW | | YNYVSWYQQHPGKA |
| | | | | VSSIYPSGGITFYADTV | | PKLMIYDVSNRPSGV |
| | | | | KGRFTISRDNSKNTLY | | SNRFSGSKSGNTASL |
| | | | | LQMNSLRAEDTAVYY | | TISGLQAEDEADYYC |
| | | | | CARIKLGTVTTVDYW | | SSYTSSSTRVFGTGT |
| | | | | GQGTLVTVSS | | KVTVL |
| MLN591 | | PSMA | 639 | EVQLVQSGPEVKKPGA | 739 | DIQMTQSPSSLSTSVG |
| | | | | TVKISCKTSGYTFTEY | | DRVTLTCKASQDVG |
| | | | | TIHWVKQAPGKGLEW | | TAVDWYQQKPGPSP |
| | | | | IGNINPNNGGTTYNQ | | KLLIYWASTRHTGIP |
| | | | | KFEDKATLTVDKSTDT | | SRFSGSGSGTDFTLTI |
| | | | | AYMELSSLRSEDTAVY | | SSLQPEDFADYYCQQ |
| | | | | YCAAGWNFDYWGQG | | YNSYPLTFGPGTKVD |
| | | | | TLLTVSS | | IK |
| MT112 | pasotuxizumab | PSMA | 640 | QVQLVESGGGLVKPGE | 740 | DIQMTQSPSSLSASVG |
| | | | | SLRLSCAASGFTFSDY | | DRVTITCKASQNVDT |
| | | | | YMYWVRQAPGKGLE | | NVAWYQQKPGQAPK |
| | | | | WVAIISDGGYYTYYSD | | SLIYSASYRYSDVPSR |
| | | | | IIKGRFTISRDNAKNSL | | FSGSASGTDFTLTISS |
| | | | | YLQMNSLKAEDTAVY | | VQSEDFATYYCQQY |
| | | | | YCARGFPLLRHGAM | | DSYPYTFGGGTKLEI |
| | | | | DYWGQGTLVTVSS | | K |
| | | ROR1 | 641 | QEQLVESGGRLVTPGG | 741 | ELVLTQSPSVSAALG |
| | | | | SLTLSCKASGFDFSAY | | SPAKITCTLSSAHKT |
| | | | | YMSWVRQAPGKGLE | | DTIDWYQQLQGEAP |
| | | | | WIATIYPSSGKTYYAT | | RYLMQVQSDGSYTK |
| | | | | WVNGRFTISSDNAQNT | | RPGVPDRFSGSSSGA |
| | | | | VDLQMNSLTAAD | | DRYLIIPSVQADDEA |
| | | | | RATYFCARDSYADDG | | DY |
| | | | | ALFNIWGPGTLVTISS | | YCGADYIGGYVFGG |
| | | | | | | GTQLTVTG |
| | | ROR1 | 642 | EVKLVESGGGLVKPGG | 742 | DIKMTQSPSSMYASL |
| | | | | SLKLSCAASGFTFSSYA | | GERVTITCKASPDINS |
| | | | | MSWVRQIPEKRLEWV | | YLSWFQQKPGKSPKT |
| | | | | ASISRGGTTYYPDSVK | | LIYRANRLVDGVPSR |
| | | | | GRFTISRDNVRNILYLQ | | FSGGGSGQDYSLTINS |
| | | | | MSSLRSEDT | | LEYEDMGIYYCLQ |
| | | | | AMYYCGRYDYDGYY | | YDEFPYTFGGGTKLE |
| | | | | AMDYWGQGTSVTVSS | | MK |
| | | ROR1 | 643 | QSLEESGGRLVTPGTPL | 743 | ELVMTQTPSSVSAAV |
| | | | | TLTCTVSGIDLNSHWM | | GGTVTINCQASQSIG |
| | | | | SWVRQAPGKGLEWIGI | | SYLAWYQQKPGQPP |
| | | | | IAASGSTYYANWAKG | | KLLIYYASNLASGVP |
| | | | | RFTISKTSTTVDLRIASP | | SRFSGSGSGTEYTLTI |
| | | | | TTEDTATY | | SGVQREDAATYYCLG |
| | | | | FCARDYGDYRLVTFNI | | SLSNSDNVFGGGTEL |
| | | | | WGPGTLVTVSS | | EIL |
| | | ROR1 | 644 | QSVKESEGDLVTPAGN | 744 | ELVMTQTPSSTSGAV |
| | | | | LTLTCTASGSDINDYPI | | GGTVTINCQASQSID |
| | | | | SWVRQAPGKGLEWIG | | SNLAWFQQKPGQPPT |
| | | | | FINSGGSTWYASWVK | | LLIYRASNLASGVPS |
| | | | | GRFTISRTSTTVDLKM | | RFSGSRSGTEYTLTIS |
| | | | | TSLTTDDTATY | | GVQREDAATYYCLG |
| | | | | FCARGYSTYYCDFNI | | GVGNVSYRTSFGGG |
| | | | | WGPGTLVTISS | | TEVVVK |
| CC49 | | TAG- | 645 | QVQLVQSGAEVVKPG | 745 | DIVMSQSPDSLAVSL |
| (Humanized) | | 72 | | ASVKISCKASGYTFTD | | GERVTLNCKSSQSLL |
| | | | | HAIHWVKQNPGQRLE | | YSGNQKNYLAWYQ |
| | | | | WIGYFSPGNDDFKYN | | QKPGQSPKLLIYWAS |
| | | | | ERFKGKATLTADTSAS | | ARESGVPDRFSGSGS |
| | | | | TAYVELSSLRSEDTAV | | GTDFTLTISSVQAEDV |
| | | | | YFCTRSLNMAYWGQG | | AVYYCQQYYSYPLT |
| | | | | TLVTVSS | | FGAGTKLELK |
| | Murine A1 | TPBG/ | 646 | QIQLVQSGPELKKPGE | 746 | SIVMTQTPKFLLVSA |
| | | 5T4 | | TVKISCKASGYTFTNF | | GDRVTITCKASQSVS |
| | | | | GMNWVKQGPGEGLK | | NDVAWYQQKPGQSP |
| | | | | WMGWINTNTGEPRY | | KLLINFATNRYTGVP |
| | | | | AEEFKGRXAFSLETTA | | NRFTGSGYGTDFTFTI |
| | | | | STAYLQINNLKNEDTA | | STVQAEDLALYFCQQ |
| | | | | TYFCARDWDGAYFFD | | DYSSPWTFGGGTKLE |
| | | | | YWGQGTTLTVSS | | IK |
| | Murine A2 | TPBG/ | 647 | QVQLQQSRPELVKPGA | 747 | SVIMSRGQIVLTQSPA |
| | | 5T4 | | SVKMSCKASGYTFTD | | IMSASLGERVTLTCT |
| | | | | YVISWVKQRTGQGLE | | ASSSVNSNYLHWYQ |
| | | | | WIGEIYPGSNSIYYNE | | QKPGSSPKLWIYSTS |
| | | | | KFKGRATLTA | | NLASGVPARFSGSGS |
| | | | | DKSSSTAYMQLSSLTS | | GTSYSLTISSMEAEDA |
| | | | | EDSAVYFCAMGGNYG | | ATYYCHQYHRSPLT |
| | | | | FDYWGQGTTLTVSS | | FGAGTKLELK |
| | Murine A3 | TPBG/ | 648 | EVQLVESGGGLVQPKG | 748 | DIVMTQSHIFMSTSV |
| | | 5T4 | | SLKLSCAASGFTFNTY | | GDRVSITCKASQDVD |
| | | | | AMNWVRQAPGKGLE | | TAVAWYQQKPGQSP |
| | | | | WVARIRSKSNNYATY | | KLLIYWASTRLTGVP |
| | | | | YADSVKDRFTISRDDS | | DRFTGSGSGTDFTLTI |
| | | | | QSMLYLQMNNLKTED | | SNVQSEDLADYFCQQ |
| | | | | TAMYXCVRQWDYDV | | YSSYPYTFGGGTKLE |
| | | | | RAMNYWGQGTSVTVSS | | IK |
| IMMU- | hRS-7 | TROP- | 649 | QVQLQQSGSELKKPGA | 749 | DIQLTQSPSSLSASVG |
| 132 | | 2 | | SVKVSCKASGYTFTNY | | DRVSITCKASQDVSI |
| | | | | GMNWVKQAPGQGLK | | AVAWYQQKPGKAPK |
| | | | | WMGWINTYTGEPTY | | LLIYSASYRYTGVPD |
| | | | | TDDFKGRFAFSLDTSV | | RFSGSGSGTDFTLTIS |
| | | | | STAYLQISSLKADDTA | | SLQPEDFAVYYCQQ |
| | | | | VYFCARGGFGSSYWY | | HYITPLTFGAGTKVE |
| | | | | FDVWGQGSLVTVSS | | IK |
| IMC-18F1 | icrucumab | VEGF | 650 | QAQVVESGGGVVQSG | 750 | EIVLTQSPGTLSLSPG |
| | | RI | | RSLRLSCAASGFAFSS | | ERATLSCRASQSVSS |
| | | | | YGMHWVRQAPGKGL | | SYLAWYQQKPGQAP |
| | | | | EWVAVIWYDGSNKY | | RLLIYGASSRATGIPD |
| | | | | YADSVRGRFTISRDNS | | RFSGSGSGTDFTLTIS |
| | | | | ENTLYLQMNSLRAEDT | | RLEPEDFAVYYCQQ |
| | | | | AVYYCARDHYGSGVH | | YGSSPLTFGGGTKVE |
| | | | | HYFYYGLDVWGQGTT | | IK |
| | | | | VTVSS | | |
| Cyramza | ramucirumab | VEGF | 651 | EVQLVQSGGGLVKPG | 751 | DIQMTQSPSSVSASIG |
| | | R2 | | GSLRLSCAASGFTFSS | | DRVTITCRASQGIDN |
| | | | | YSMNWVRQAPGKGLE | | WLGWYQQKPGKAPK |
| | | | | WVSSISSSSSYIYYADS | | LLIYDASNLDTGVPS |
| | | | | VKGRFTISRDNAKNSL | | RFSGSGSGTYFTLTIS |
| | | | | YLQMNSLRAEDTAVY | | SLQAEDFAVYFCQQ |
| | | | | YCARVTDAFDIWGQG | | AKAFPPTFGGGTKV |
| | | | | TMVTVSSA | | DIK |
| g165DFM- | alacizumabpegol | VEGF | 652 | EVQLVESGGGLVQPGG | 752 | DIQMTQSPSSLSASVG |
| PEG | | R2 | | SLRLSCAASGFTFSSY | | DRVTITCRASQDIAG |
| | | | | GMSWVRQAPGKGLE | | SLNWLQQKPGKAIKR |
| | | | | WVATITSGGSYTYYV | | LIYATSSLDSGVPKRF |
| | | | | DSVKGRFTISRDNAKN | | SGSRSGSDYTLTISSL |
| | | | | TLYLQMNSLRAEDTA | | QPEDFATYYCLQYGS |
| | | | | VYYCVRIGEDALDYW | | FPPTFGQGTKVEIK |
| | | | | GQGTLVTVSS | | |
| Imclone6.64 | | VEGF | 653 | KVQLQQSGTELVKPGA | 753 | DIVLTQSPASLAVSLG |
| | | R2 | | SVKVSCKASGYIFTEYI | | QRATISCRASESVDSY |
| | | | | IHWVKQRSGQGLEWIG | | GNSFMHWYQQKPGQ |
| | | | | WLYPESNIIKYNEKFK | | PPKLLIYRASNLESGI |
| | | | | DKATLTADKSSSTVYM | | PARFSGSGSRTDFTLT |
| | | | | ELSRLTSEDSAVYFCTR | | INPVEADDVATYYCQ |
| | | | | HDGTNFDYWGQGTTL | | QSNEDPLTFGAGTKL |
| | | | | TVSSA | | ELK |

*underlined & bolded sequences, if present, are CDRs within the VL and VH

### Anti-Epcam (Epithelial Cell Adhesion Molecule) Binding Domains:

[0310] In some embodiments of the compositions of this disclosure, the binding domain can have specific binding affinity to the tumor-specific marker EpCAM. The binding domain can comprise VL and VH derived from a monoclonal antibody to EpCAM. Some embodiments of the compositions of this disclosure can comprise a bispecific bioactive assembly comprising the binding domain specific for EpCAM and another binding domain (e.g., having specific binding affinity to an effector cell).

[0311] Monoclonal antibodies to EpCAM are known in the art (such as described more fully in the following paragraphs). Exemplary, non-limiting examples of EpCAM monoclonal antibodies and the VL and VH sequences thereof are presented in Table 6. Some embodiments of the binding domain with binding affinity to the tumor-specific marker EpCAM can comprise anti-EpCAM VL and VH sequences set forth in Table 6. Some embodiments of the binding domain with binding affinity to the tumor-specific marker EpCAM can comprise VH and VL regions wherein each VH and VL regions can exhibit at least (about) 90%, or at least (about) 91%, or at least (about) 92%, or at least (about) 93%, or at least (about) 94%, or at least (about) 95%, or at least (about) 96%, or at least (about) 97%, or at least (about) 98%, or at least (about) 99% identity to, or is identical to, paired VL and VH sequences of the anti-EpCAM antibodies (such as 4D5MUCB) of Table 6. Some embodiments of the binding domain with binding affinity to the tumor-specific marker EpCAM can comprise the CDR-L1 region, the CDR-L2 region, the CDR-L3 region, the CDR-H1 region, the CDR-H2 region, and the CDR-H3 region, wherein each can be derived from the respective VL and VH sequences set forth in Table 6. Some embodiments of the compositions of this disclosure can comprise a bispecific bioactive assembly comprising a binding domain specific for EpCAM and another binding domain (e.g., having specific binding affinity to an effector cell). In some embodiments of the compositions of this disclosure, the binding domain specific for EpCAM can have a K_{d} value of greater than 10⁻⁷ to 10⁻¹⁰ M, as determined using an in vitro binding assay. The binding domains can be in a scFv format. The binding domains can be in a single chain diabody format.

[0312] In general, epithelial cell adhesion molecule (EpCAM, also known as 17-1A antigen) is a 40-kDa membrane-integrated glycoprotein composed of 314 amino acids expressed in certain epithelia and on many human carcinomas (see, Balzar, The biology of the 17-1A antigen (Ep-CAM), J. Mol. Med. 1999, 77:699-712). EpCAM was initially discovered by use of the murine monoclonal antibody 17-1A/edrecolomab that was generated by immunization of mice with colon carcinoma cells (Goettlinger, Int J Cancer. 1986; 38, 47-53 and Simon, Proc. Natl. Acad. Sci. USA. 1990; 87, 2755-2759). Because of their epithelial cell origin, tumor cells from most carcinomas express EpCAM on their surface (more so than normal, healthy cells), including the majority of primary, metastatic, and disseminated non-small cell lung carcinoma cells (Passlick, B., et al. The 17-1A antigen is expressed on primary, metastatic and disseminated non-small cell lung carcinoma cells. Int. J. Cancer 87(4):548-552, 2000), gastric and gastro-oesophageal junction adenocarcinomas (Martin, I. G., Expression of the 17-1A antigen in gastric and gastro-oesophageal junction adenocarcinomas: a potential immunotherapeutic target? J Clin Pathol 1999; 52:701-704), and breast and colorectal cancer (Packeisen J, et al. Detection of surface antigen 17-1A in breast and colorectal cancer. Hybridoma. 1999 18(1):37-40) and, therefore, are an attractive target for immunotherapy approaches. Indeed, increased expression of EpCAM correlates to increased epithelial proliferation; in breast cancer, overexpression of EpCAM on tumor cells is a predictor of survival (Gastl, Lancet. 2000, 356, 1981-1982). Due to their epithelial cell origin, tumor cells from most carcinomas still express EpCAM on their surface, and the bispecific solitomab single-chain antibody composition that targets EpCAM on tumor cells and also contains a CD3 binding region has been proposed for use against primary uterine and ovarian CS cell lines (Ferrari F, et al., Solitomab, an EpCAM/CD3 bispecific antibody construct (BITE®), is highly active against primary uterine and ovarian carcinosarcoma cell lines in vitro. J Exp Clin Cancer Res. 2015 34:123). Monoclonal antibodies to EpCAM are known in the art. The EpCAM monclonals ING-1, 3622W94, adecatumumab and edrecolomab have been described as having been tested in human patients (Münz, M. Side-by-side analysis of five clinically tested anti-EpCAM monoclonal antibodies Cancer Cell International, 10:44-56, 2010). Bispecific antibodies directed against EpCAM and against CD3 have also been described, including construction of two different bispecific antibodies by fusing a hybridoma producing monoclonal antibody against EpCAM with either of the two hybridomas OKT3 and 9.3 (Möller, SA, Reisfeld, RA, Bispecific-monoclonal-antibody-directed lysis of ovarian carcinoma cells by activated human T lymphocytes. Cancer Immunol. Immunother. 33:210-216, 1991). Other examples of bispecific antibodies against EpCAM include BiUII, (anti-CD3 (rat) x anti-EpCAM (mouse)) (Zeidler, J. Immunol., 1999, 163:1247-1252), a scFv CD3/17-1A-bispecific (Mack, M. A small bispecific antibody composition expressed as a functional single-chain molecule with high tumor cell cytotoxicity. Proc. Natl. Acad. Sci., 1995, 92:7021-7025), and a partially humanized bispecific diabody having anti-CD3 and antiEpCAM specificity (Helfrich, W. Construction and characterization of a bispecific diabody for retargeting T cells to human carcinomas. Int. J. Cancer, 1998, 76:232-239).

### Anti-CCR5 Binding Domains:

[0313] In some embodiments of the compositions of this disclosure, the binding domain can have specific binding affinity to the marker/antigen CCR5. Some embodiments of the compositions of this disclosure can comprise a bispecific bioactive assembly comprising the binding domain specific for CCR5 and another binding domain (e.g., having specific binding affinity to an effector cell). The binding domain can comprise VL and VH derived from a monoclonal antibody to CCR5. Monoclonal antibodies to CCR5 are known in the art. Some embodiments of the binding domain with binding affinity to the marker/antigen CCR5 can comprise anti-CCR5 VL and VH sequence(s). Some embodiments of the binding domain with binding affinity to the marker/antigen CCR5 can comprise VH and VL regions wherein each VH and VL regions can exhibit at least (about) 90%, or at least (about) 91%, or at least (about) 92%, or at least (about) 93%, or at least (about) 94%, or at least (about) 95%, or at least (about) 96%, or at least (about) 97%, or at least (about) 98%, or at least (about) 99% identity to, or is identical to, paired VL and VH sequence(s) of anti-CCR5 antibody/antibodies. Some embodiments of the binding domain with binding affinity to the marker/antigen CCR5 can comprise the CDR-L1 region, the CDR-L2 region, the CDR-L3 region, the CDR-H1 region, the CDR-H2 region, and the CDR-H3 region, wherein each can be derived from the respective VL and VH sequence(s). In some embodiments of the compositions of this disclosure, the binding domain specific for CCR5 can have a K_{d} value of greater than 10⁻⁷ to 10⁻¹⁰ M, as determined using an in vitro binding assay.

### Anti-CD19 Binding Domains:

[0314] In some embodiments of the compositions of this disclosure, the binding domain can have specific binding affinity to the marker/antigen CD19. Some embodiments of the compositions of this disclosure can comprise a bispecific bioactive assembly comprising the binding domain specific for CD19 and another binding domain (e.g., having specific binding affinity to an effector cell). The binding domain can comprise VL and VH derived from a monoclonal antibody to CD19. Monoclonal antibodies to CD19 are known in the art. Exemplary, non-limiting example(s) of CD19 monoclonal antibodies and the VL and VH sequences thereof are presented in Table 6. Some embodiments of the binding domain with binding affinity to the marker/antigen CD19 can comprise anti-CD19 VL and VH sequence(s) set forth in Table 6. Some embodiments of the binding domain with binding affinity to the marker/antigen CD19 can comprise VH and VL regions wherein each VH and VL regions can exhibit at least (about) 90%, or at least (about) 91%, or at least (about) 92%, or at least (about) 93%, or at least (about) 94%, or at least (about) 95%, or at least (about) 96%, or at least (about) 97%, or at least (about) 98%, or at least (about) 99% identity to, or is identical to, paired VL and VH sequence(s) of the anti-CD19 antibody/antibodies (e.g., MT103) of Table 6. Some embodiments of the binding domain with binding affinity to the marker/antigen CD19 can comprise the CDR-L1 region, the CDR-L2 region, the CDR-L3 region, the CDR-H1 region, the CDR-H2 region, and the CDR-H3 region, wherein each can be derived from the respective VL and VH sequence(s) set forth in Table 6. In some embodiments of the compositions of this disclosure, the binding domain specific for CD19 can have a K_{d} value of greater than 10⁻⁷ to 10⁻¹⁰ M, as determined using an in vitro binding assay.

### Anti-HER-2 Binding Domains:

[0315] In some embodiments of the compositions of this disclosure, the binding domain can have specific binding affinity to the marker/antigen HER-2. Some embodiments of the compositions of this disclosure can comprise a bispecific bioactive assembly comprising the binding domain specific for HER-2 and another binding domain (e.g., having specific binding affinity to an effector cell). The binding domain can comprise VL and VH derived from a monoclonal antibody to HER-2. Monoclonal antibodies to HER-2 are known in the art. Exemplary, non-limiting example(s) of HER-2 monoclonal antibodies and the VL and VH sequences thereof are presented in Table 6. Some embodiments of the binding domain with binding affinity to the marker/antigen HER-2 can comprise anti-HER-2 VL and VH sequence(s) set forth in Table 6. Some embodiments of the binding domain with binding affinity to the marker/antigen HER-2 can comprise VH and VL regions wherein each VH and VL regions can exhibit at least (about) 90%, or at least (about) 91%, or at least (about) 92%, or at least (about) 93%, or at least (about) 94%, or at least (about) 95%, or at least (about) 96%, or at least (about) 97%, or at least (about) 98%, or at least (about) 99% identity to, or is identical to, paired VL and VH sequence(s) of the anti-HER-2 antibody/antibodies of Table 6. Some embodiments of the binding domain with binding affinity to the marker/antigen HER-2 can comprise the CDR-L1 region, the CDR-L2 region, the CDR-L3 region, the CDR-H1 region, the CDR-H2 region, and the CDR-H3 region, wherein each can be derived from the respective VL and VH sequence(s) set forth in Table 6. In some embodiments of the compositions of this disclosure, the binding domain specific for HER-2 can have a K_{d} value of greater than 10⁻⁷ to 10⁻¹⁰ M, as determined using an in vitro binding assay.

### Anti-HER-3 Binding Domains:

[0316] In some embodiments of the compositions of this disclosure, the binding domain can have specific binding affinity to the marker/antigen HER-3. Some embodiments of the compositions of this disclosure can comprise a bispecific bioactive assembly comprising the binding domain specific for HER-3 and another binding domain (e.g., having specific binding affinity to an effector cell). The binding domain can comprise VL and VH derived from a monoclonal antibody to HER-3. Monoclonal antibodies to HER-3 are known in the art. Exemplary, non-limiting example(s) of HER-3 monoclonal antibodies and the VL and VH sequences thereof are presented in Table 6. Some embodiments of the binding domain with binding affinity to the marker/antigen HER-3 can comprise anti-HER-3 VL and VH sequence(s) set forth in Table 6. Some embodiments of the binding domain with binding affinity to the marker/antigen HER-3 can comprise VH and VL regions wherein each VH and VL regions can exhibit at least (about) 90%, or at least (about) 91%, or at least (about) 92%, or at least (about) 93%, or at least (about) 94%, or at least (about) 95%, or at least (about) 96%, or at least (about) 97%, or at least (about) 98%, or at least (about) 99% identity to, or is identical to, paired VL and VH sequence(s) of the anti-HER-3 antibody/antibodies of Table 6. Some embodiments of the binding domain with binding affinity to the marker/antigen HER-3 can comprise the CDR-L1 region, the CDR-L2 region, the CDR-L3 region, the CDR-H1 region, the CDR-H2 region, and the CDR-H3 region, wherein each can be derived from the respective VL and VH sequence(s) set forth in Table 6. In some embodiments of the compositions of this disclosure, the binding domain specific for HER-3 can have a K_{d} value of greater than 10⁻⁷ to 10⁻¹⁰ M, as determined using an in vitro binding assay.

### Anti-HER-4 Binding Domains:

[0317] In some embodiments of the compositions of this disclosure, the binding domain can have specific binding affinity to the marker/antigen HER-4. Some embodiments of the compositions of this disclosure can comprise a bispecific bioactive assembly comprising the binding domain specific for HER-4 and another binding domain (e.g., having specific binding affinity to an effector cell). The binding domain can comprise VL and VH derived from a monoclonal antibody to HER-4. Monoclonal antibodies to HER-4 are known in the art. Exemplary, non-limiting example(s) of HER-4 monoclonal antibodies and the VL and VH sequences thereof are presented in Table 6. Some embodiments of the binding domain with binding affinity to the marker/antigen HER-4 can comprise anti-HER-4 VL and VH sequence(s) set forth in Table 6. Some embodiments of the binding domain with binding affinity to the marker/antigen HER-4 can comprise VH and VL regions wherein each VH and VL regions can exhibit at least (about) 90%, or at least (about) 91%, or at least (about) 92%, or at least (about) 93%, or at least (about) 94%, or at least (about) 95%, or at least (about) 96%, or at least (about) 97%, or at least (about) 98%, or at least (about) 99% identity to, or is identical to, paired VL and VH sequence(s) of the anti-HER-4 antibody/antibodies of Table 6. Some embodiments of the binding domain with binding affinity to the marker/antigen HER-4 can comprise the CDR-L1 region, the CDR-L2 region, the CDR-L3 region, the CDR-H1 region, the CDR-H2 region, and the CDR-H3 region, wherein each can be derived from the respective VL and VH sequence(s) set forth in Table 6. In some embodiments of the compositions of this disclosure, the binding domain specific for HER-4 can have a K_{d} value of greater than 10⁻⁷ to 10⁻¹⁰ M, as determined using an in vitro binding assay.

### Anti-EGFR (Epidermal Growth Factor Receptor) Binding Domains:

[0318] In some embodiments of the compositions of this disclosure, the binding domain can have specific binding affinity to the marker/antigen EGFR. Some embodiments of the compositions of this disclosure can comprise a bispecific bioactive assembly comprising the binding domain specific for EGFR and another binding domain (e.g., having specific binding affinity to an effector cell). The binding domain can comprise VL and VH derived from a monoclonal antibody to EGFR. Monoclonal antibodies to EGFR are known in the art. Exemplary, non-limiting example(s) of EGFR monoclonal antibodies and the VL and VH sequences thereof are presented in Table 6. Some embodiments of the binding domain with binding affinity to the marker/antigen EGFR can comprise anti-EGFR VL and VH sequence(s) set forth in Table 6. Some embodiments of the binding domain with binding affinity to the marker/antigen EGFR can comprise VH and VL regions wherein each VH and VL regions can exhibit at least (about) 90%, or at least (about) 91%, or at least (about) 92%, or at least (about) 93%, or at least (about) 94%, or at least (about) 95%, or at least (about) 96%, or at least (about) 97%, or at least (about) 98%, or at least (about) 99% identity to, or is identical to, paired VL and VH sequence(s) of the anti-EGFR antibody/antibodies of Table 6. Some embodiments of the binding domain with binding affinity to the marker/antigen EGFR can comprise the CDR-L1 region, the CDR-L2 region, the CDR-L3 region, the CDR-H1 region, the CDR-H2 region, and the CDR-H3 region, wherein each can be derived from the respective VL and VH sequence(s) set forth in Table 6. In some embodiments of the compositions of this disclosure, the binding domain specific for EGFR can have a K_{d} value of greater than 10⁻⁷ to 10⁻¹⁰ M, as determined using an in vitro binding assay.

### Anti-PSMA Binding Domains:

[0319] In some embodiments of the compositions of this disclosure, the binding domain can have specific binding affinity to the marker/antigen PSMA (prostate-specific membrane antigen). Some embodiments of the compositions of this disclosure can comprise a bispecific bioactive assembly comprising the binding domain specific for PSMA and another binding domain (e.g., having specific binding affinity to an effector cell). The binding domain can comprise VL and VH derived from a monoclonal antibody to PSMA. Monoclonal antibodies to PSMA are known in the art. Exemplary, non-limiting example(s) of PSMA monoclonal antibodies and the VL and VH sequences thereof are presented in Table 6. Some embodiments of the binding domain with binding affinity to the marker/antigen PSMA can comprise anti-PSMA VL and VH sequence(s) set forth in Table 6. Some embodiments of the binding domain with binding affinity to the marker/antigen PSMA can comprise VH and VL regions wherein each VH and VL regions can exhibit at least (about) 90%, or at least (about) 91%, or at least (about) 92%, or at least (about) 93%, or at least (about) 94%, or at least (about) 95%, or at least (about) 96%, or at least (about) 97%, or at least (about) 98%, or at least (about) 99% identity to, or is identical to, paired VL and VH sequence(s) of the anti-PSMA antibody/antibodies of Table 6. Some embodiments of the binding domain with binding affinity to the marker/antigen PSMA can comprise the CDR-L1 region, the CDR-L2 region, the CDR-L3 region, the CDR-H1 region, the CDR-H2 region, and the CDR-H3 region, wherein each can be derived from the respective VL and VH sequence(s) set forth in Table 6. In some embodiments of the compositions of this disclosure, the binding domain specific for PSMA can have a K_{d} value of greater than 10⁻⁷ to 10⁻¹⁰ M, as determined using an in vitro binding assay.

### Anti-CEA Binding Domains:

[0320] In some embodiments of the compositions of this disclosure, the binding domain can have specific binding affinity to the marker/antigen CEA (carcinoembryonic antigen). Some embodiments of the compositions of this disclosure can comprise a bispecific bioactive assembly comprising the binding domain specific for CEA and another binding domain (e.g., having specific binding affinity to an effector cell). The binding domain can comprise VL and VH derived from a monoclonal antibody to CEA. Monoclonal antibodies to CEA are known in the art. Exemplary, non-limiting example(s) of CEA monoclonal antibodies and the VL and VH sequences thereof are presented in Table 6. Some embodiments of the binding domain with binding affinity to the marker/antigen CEA can comprise anti-CEA VL and VH sequence(s) set forth in Table 6. Some embodiments of the binding domain with binding affinity to the marker/antigen CEA can comprise VH and VL regions wherein each VH and VL regions can exhibit at least (about) 90%, or at least (about) 91%, or at least (about) 92%, or at least (about) 93%, or at least (about) 94%, or at least (about) 95%, or at least (about) 96%, or at least (about) 97%, or at least (about) 98%, or at least (about) 99% identity to, or is identical to, paired VL and VH sequence(s) of the anti-CEA antibody/antibodies of Table 6. Some embodiments of the binding domain with binding affinity to the marker/antigen CEA can comprise the CDR-L1 region, the CDR-L2 region, the CDR-L3 region, the CDR-H1 region, the CDR-H2 region, and the CDR-H3 region, wherein each can be derived from the respective VL and VH sequence(s) set forth in Table 6. In some embodiments of the compositions of this disclosure, the binding domain specific for CEA can have a K_{d} value of greater than 10⁻⁷ to 10⁻¹⁰ M, as determined using an in vitro binding assay.

### Anti-MUC1 Binding Domains:

[0321] In some embodiments of the compositions of this disclosure, the binding domain can have specific binding affinity to the marker/antigen MUC1. Some embodiments of the compositions of this disclosure can comprise a bispecific bioactive assembly comprising the binding domain specific for MUC1 and another binding domain (e.g., having specific binding affinity to an effector cell). The binding domain can comprise VL and VH derived from a monoclonal antibody to MUC1. Monoclonal antibodies to MUC1 are known in the art. Exemplary, non-limiting example(s) of MUC1 monoclonal antibodies and the VL and VH sequences thereof are presented in Table 6. Some embodiments of the binding domain with binding affinity to the marker/antigen MUC1 can comprise anti-MUC1 VL and VH sequence(s) set forth in Table 6. Some embodiments of the binding domain with binding affinity to the marker/antigen MUC1 can comprise VH and VL regions wherein each VH and VL regions can exhibit at least (about) 90%, or at least (about) 91%, or at least (about) 92%, or at least (about) 93%, or at least (about) 94%, or at least (about) 95%, or at least (about) 96%, or at least (about) 97%, or at least (about) 98%, or at least (about) 99% identity to, or is identical to, paired VL and VH sequence(s) of the anti-MUC1 antibody/antibodies of Table 6. Some embodiments of the binding domain with binding affinity to the marker/antigen MUC1 can comprise the CDR-L1 region, the CDR-L2 region, the CDR-L3 region, the CDR-H1 region, the CDR-H2 region, and the CDR-H3 region, wherein each can be derived from the respective VL and VH sequence(s) set forth in Table 6. In some embodiments of the compositions of this disclosure, the binding domain specific for MUC1 can have a K_{d} value of greater than 10⁻⁷ to 10⁻¹⁰ M, as determined using an in vitro binding assay.

### Anti-MUC2 Binding Domains:

[0322] In some embodiments of the compositions of this disclosure, the binding domain can have specific binding affinity to the marker/antigen MUC2. Some embodiments of the compositions of this disclosure can comprise a bispecific bioactive assembly comprising the binding domain specific for MUC2 and another binding domain (e.g., having specific binding affinity to an effector cell). The binding domain can comprise VL and VH derived from a monoclonal antibody to MUC2. Monoclonal antibodies to MUC2 are known in the art. Some embodiments of the binding domain with binding affinity to the marker/antigen MUC2 can comprise anti-MUC2 VL and VH sequence(s). Some embodiments of the binding domain with binding affinity to the marker/antigen MUC2 can comprise VH and VL regions wherein each VH and VL regions can exhibit at least (about) 90%, or at least (about) 91%, or at least (about) 92%, or at least (about) 93%, or at least (about) 94%, or at least (about) 95%, or at least (about) 96%, or at least (about) 97%, or at least (about) 98%, or at least (about) 99% identity to, or is identical to, paired VL and VH sequence(s) of anti-MUC2 antibody/antibodies. Some embodiments of the binding domain with binding affinity to the marker/antigen MUC2 can comprise the CDR-L1 region, the CDR-L2 region, the CDR-L3 region, the CDR-H1 region, the CDR-H2 region, and the CDR-H3 region, wherein each can be derived from the respective VL and VH sequence(s). In some embodiments of the compositions of this disclosure, the binding domain specific for MUC2 can have a K_{d} value of greater than 10⁻⁷ to 10⁻¹⁰ M, as determined using an in vitro binding assay.

### Anti-MUC3 Binding Domains:

[0323] In some embodiments of the compositions of this disclosure, the binding domain can have specific binding affinity to the marker/antigen MUC3. Some embodiments of the compositions of this disclosure can comprise a bispecific bioactive assembly comprising the binding domain specific for MUC3 and another binding domain (e.g., having specific binding affinity to an effector cell). The binding domain can comprise VL and VH derived from a monoclonal antibody to MUC3. Monoclonal antibodies to MUC3 are known in the art. Some embodiments of the binding domain with binding affinity to the marker/antigen MUC3 can comprise anti-MUC3 VL and VH sequence(s). Some embodiments of the binding domain with binding affinity to the marker/antigen MUC3 can comprise VH and VL regions wherein each VH and VL regions can exhibit at least (about) 90%, or at least (about) 91%, or at least (about) 92%, or at least (about) 93%, or at least (about) 94%, or at least (about) 95%, or at least (about) 96%, or at least (about) 97%, or at least (about) 98%, or at least (about) 99% identity to, or is identical to, paired VL and VH sequence(s) of anti-MUC3 antibody/antibodies. Some embodiments of the binding domain with binding affinity to the marker/antigen MUC3 can comprise the CDR-L1 region, the CDR-L2 region, the CDR-L3 region, the CDR-H1 region, the CDR-H2 region, and the CDR-H3 region, wherein each can be derived from the respective VL and VH sequence(s). In some embodiments of the compositions of this disclosure, the binding domain specific for MUC3 can have a K_{d} value of greater than 10⁻⁷ to 10⁻¹⁰ M, as determined using an in vitro binding assay.

### Anti-MUC4 Binding Domains:

[0324] In some embodiments of the compositions of this disclosure, the binding domain can have specific binding affinity to the marker/antigen MUC4. Some embodiments of the compositions of this disclosure can comprise a bispecific bioactive assembly comprising the binding domain specific for MUC4 and another binding domain (e.g., having specific binding affinity to an effector cell). The binding domain can comprise VL and VH derived from a monoclonal antibody to MUC4. Monoclonal antibodies to MUC4 are known in the art. Some embodiments of the binding domain with binding affinity to the marker/antigen MUC4 can comprise anti-MUC4 VL and VH sequence(s). Some embodiments of the binding domain with binding affinity to the marker/antigen MUC4 can comprise VH and VL regions wherein each VH and VL regions can exhibit at least (about) 90%, or at least (about) 91%, or at least (about) 92%, or at least (about) 93%, or at least (about) 94%, or at least (about) 95%, or at least (about) 96%, or at least (about) 97%, or at least (about) 98%, or at least (about) 99% identity to, or is identical to, paired VL and VH sequence(s) of anti-MUC4 antibody/antibodies. Some embodiments of the binding domain with binding affinity to the marker/antigen MUC4 can comprise the CDR-L1 region, the CDR-L2 region, the CDR-L3 region, the CDR-H1 region, the CDR-H2 region, and the CDR-H3 region, wherein each can be derived from the respective VL and VH sequence(s). In some embodiments of the compositions of this disclosure, the binding domain specific for MUC4 can have a K_{d} value of greater than 10⁻⁷ to 10⁻¹⁰ M, as determined using an in vitro binding assay.

### Anti-MUC5AC Binding Domains:

[0325] In some embodiments of the compositions of this disclosure, the binding domain can have specific binding affinity to the marker/antigen MUC5AC. Some embodiments of the compositions of this disclosure can comprise a bispecific bioactive assembly comprising the binding domain specific for MUC5AC and another binding domain (e.g., having specific binding affinity to an effector cell). The binding domain can comprise VL and VH derived from a monoclonal antibody to MUC5AC. Monoclonal antibodies to MUC5AC are known in the art. Some embodiments of the binding domain with binding affinity to the marker/antigen MUC5AC can comprise anti-MUC5AC VL and VH sequence(s). Some embodiments of the binding domain with binding affinity to the marker/antigen MUC5AC can comprise VH and VL regions wherein each VH and VL regions can exhibit at least (about) 90%, or at least (about) 91%, or at least (about) 92%, or at least (about) 93%, or at least (about) 94%, or at least (about) 95%, or at least (about) 96%, or at least (about) 97%, or at least (about) 98%, or at least (about) 99% identity to, or is identical to, paired VL and VH sequence(s) of anti-MUC5AC antibody/antibodies. Some embodiments of the binding domain with binding affinity to the marker/antigen MUC5AC can comprise the CDR-L1 region, the CDR-L2 region, the CDR-L3 region, the CDR-H1 region, the CDR-H2 region, and the CDR-H3 region, wherein each can be derived from the respective VL and VH sequence(s). In some embodiments of the compositions of this disclosure, the binding domain specific for MUC5AC can have a K_{d} value of greater than 10⁻⁷ to 10⁻¹⁰ M, as determined using an in vitro binding assay.

### Anti-MUC5B Binding Domains:

[0326] In some embodiments of the compositions of this disclosure, the binding domain can have specific binding affinity to the marker/antigen MUC5B. Some embodiments of the compositions of this disclosure can comprise a bispecific bioactive assembly comprising the binding domain specific for MUC5B and another binding domain (e.g., having specific binding affinity to an effector cell). The binding domain can comprise VL and VH derived from a monoclonal antibody to MUC5B. Monoclonal antibodies to MUC5B are known in the art. Some embodiments of the binding domain with binding affinity to the marker/antigen MUC5B can comprise anti-MUC5B VL and VH sequence(s). Some embodiments of the binding domain with binding affinity to the marker/antigen MUC5B can comprise VH and VL regions wherein each VH and VL regions can exhibit at least (about) 90%, or at least (about) 91%, or at least (about) 92%, or at least (about) 93%, or at least (about) 94%, or at least (about) 95%, or at least (about) 96%, or at least (about) 97%, or at least (about) 98%, or at least (about) 99% identity to, or is identical to, paired VL and VH sequence(s) of anti-MUC5B antibody/antibodies. Some embodiments of the binding domain with binding affinity to the marker/antigen MUC5B can comprise the CDR-L1 region, the CDR-L2 region, the CDR-L3 region, the CDR-H1 region, the CDR-H2 region, and the CDR-H3 region, wherein each can be derived from the respective VL and VH sequence(s). In some embodiments of the compositions of this disclosure, the binding domain specific for MUC5B can have a K_{d} value of greater than 10⁻⁷ to 10⁻¹⁰ M, as determined using an in vitro binding assay.

### Anti-MUC7 Binding Domains:

[0327] In some embodiments of the compositions of this disclosure, the binding domain can have specific binding affinity to the marker/antigen MUC7. Some embodiments of the compositions of this disclosure can comprise a bispecific bioactive assembly comprising the binding domain specific for MUC7 and another binding domain (e.g., having specific binding affinity to an effector cell). The binding domain can comprise VL and VH derived from a monoclonal antibody to MUC7. Monoclonal antibodies to MUC7 are known in the art. Some embodiments of the binding domain with binding affinity to the marker/antigen MUC7 can comprise anti-MUC7 VL and VH sequence(s). Some embodiments of the binding domain with binding affinity to the marker/antigen MUC7 can comprise VH and VL regions wherein each VH and VL regions can exhibit at least (about) 90%, or at least (about) 91%, or at least (about) 92%, or at least (about) 93%, or at least (about) 94%, or at least (about) 95%, or at least (about) 96%, or at least (about) 97%, or at least (about) 98%, or at least (about) 99% identity to, or is identical to, paired VL and VH sequence(s) of anti-MUC7 antibody/antibodies. Some embodiments of the binding domain with binding affinity to the marker/antigen MUC7 can comprise the CDR-L1 region, the CDR-L2 region, the CDR-L3 region, the CDR-H1 region, the CDR-H2 region, and the CDR-H3 region, wherein each can be derived from the respective VL and VH sequence(s). In some embodiments of the compositions of this disclosure, the binding domain specific for MUC7 can have a K_{d} value of greater than 10⁻⁷ to 10⁻¹⁰ M, as determined using an in vitro binding assay.

### Anti-bhCG Binding Domains:

[0328] In some embodiments of the compositions of this disclosure, the binding domain can have specific binding affinity to the marker/antigen βhCG. Some embodiments of the compositions of this disclosure can comprise a bispecific bioactive assembly comprising the binding domain specific for βhCG and another binding domain (e.g., having specific binding affinity to an effector cell). The binding domain can comprise VL and VH derived from a monoclonal antibody to βhCG. Monoclonal antibodies to βhCG are known in the art. Some embodiments of the binding domain with binding affinity to the marker/antigen βhCG can comprise anti-βhCG VL and VH sequence(s). Some embodiments of the binding domain with binding affinity to the marker/antigen βhCG can comprise VH and VL regions wherein each VH and VL regions can exhibit at least (about) 90%, or at least (about) 91%, or at least (about) 92%, or at least (about) 93%, or at least (about) 94%, or at least (about) 95%, or at least (about) 96%, or at least (about) 97%, or at least (about) 98%, or at least (about) 99% identity to, or is identical to, paired VL and VH sequence(s) of anti-βhCG antibody/antibodies. Some embodiments of the binding domain with binding affinity to the marker/antigen βhCG can comprise the CDR-L1 region, the CDR-L2 region, the CDR-L3 region, the CDR-H1 region, the CDR-H2 region, and the CDR-H3 region, wherein each can be derived from the respective VL and VH sequence(s). In some embodiments of the compositions of this disclosure, the binding domain specific for βhCG can have a K_{d} value of greater than 10⁻⁷ to 10⁻¹⁰ M, as determined using an in vitro binding assay.

### Anti-Lewis-Y Binding Domains:

[0329] In some embodiments of the compositions of this disclosure, the binding domain can have specific binding affinity to the marker/antigen Lewis-Y. Some embodiments of the compositions of this disclosure can comprise a bispecific bioactive assembly comprising the binding domain specific for Lewis-Y and another binding domain (e.g., having specific binding affinity to an effector cell). The binding domain can comprise VL and VH derived from a monoclonal antibody to Lewis-Y. Monoclonal antibodies to Lewis-Y are known in the art. Exemplary, non-limiting example(s) of Lewis-Y monoclonal antibodies and the VL and VH sequences thereof are presented in Table 6. Some embodiments of the binding domain with binding affinity to the marker/antigen Lewis-Y can comprise anti-Lewis-Y VL and VH sequence(s) set forth in Table 6. Some embodiments of the binding domain with binding affinity to the marker/antigen Lewis-Y can comprise VH and VL regions wherein each VH and VL regions can exhibit at least (about) 90%, or at least (about) 91%, or at least (about) 92%, or at least (about) 93%, or at least (about) 94%, or at least (about) 95%, or at least (about) 96%, or at least (about) 97%, or at least (about) 98%, or at least (about) 99% identity to, or is identical to, paired VL and VH sequence(s) of the anti-Lewis-Y antibody/antibodies of Table 6. Some embodiments of the binding domain with binding affinity to the marker/antigen Lewis-Y can comprise the CDR-L1 region, the CDR-L2 region, the CDR-L3 region, the CDR-H1 region, the CDR-H2 region, and the CDR-H3 region, wherein each can be derived from the respective VL and VH sequence(s) set forth in Table 6. In some embodiments of the compositions of this disclosure, the binding domain specific for Lewis-Y can have a K_{d} value of greater than 10⁻⁷ to 10⁻¹⁰ M, as determined using an in vitro binding assay.

### Anti-CD20 Binding Domains

[0330] In some embodiments of the compositions of this disclosure, the binding domain can have specific binding affinity to the marker/antigen CD20. Some embodiments of the compositions of this disclosure can comprise a bispecific bioactive assembly comprising the binding domain specific for CD20 and another binding domain (e.g., having specific binding affinity to an effector cell). The binding domain can comprise VL and VH derived from a monoclonal antibody to CD20. Monoclonal antibodies to CD20 are known in the art. Exemplary, non-limiting example(s) of CD20 monoclonal antibodies and the VL and VH sequences thereof are presented in Table 6. Some embodiments of the binding domain with binding affinity to the marker/antigen CD20 can comprise anti-CD20 VL and VH sequence(s) set forth in Table 6. Some embodiments of the binding domain with binding affinity to the marker/antigen CD20 can comprise VH and VL regions wherein each VH and VL regions can exhibit at least (about) 90%, or at least (about) 91%, or at least (about) 92%, or at least (about) 93%, or at least (about) 94%, or at least (about) 95%, or at least (about) 96%, or at least (about) 97%, or at least (about) 98%, or at least (about) 99% identity to, or is identical to, paired VL and VH sequence(s) of the anti-CD20 antibody/antibodies of Table 6. Some embodiments of the binding domain with binding affinity to the marker/antigen CD20 can comprise the CDR-L1 region, the CDR-L2 region, the CDR-L3 region, the CDR-H1 region, the CDR-H2 region, and the CDR-H3 region, wherein each can be derived from the respective VL and VH sequence(s) set forth in Table 6. In some embodiments of the compositions of this disclosure, the binding domain specific for CD20 can have a K_{d} value of greater than 10⁻⁷ to 10⁻¹⁰ M, as determined using an in vitro binding assay.

### Anti-CD33 Binding Domains

[0331] In some embodiments of the compositions of this disclosure, the binding domain can have specific binding affinity to the marker/antigen CD33. Some embodiments of the compositions of this disclosure can comprise a bispecific bioactive assembly comprising the binding domain specific for CD33 and another binding domain (e.g., having specific binding affinity to an effector cell). The binding domain can comprise VL and VH derived from a monoclonal antibody to CD33. Monoclonal antibodies to CD33 are known in the art. Exemplary, non-limiting example(s) of CD33 monoclonal antibodies and the VL and VH sequences thereof are presented in Table 6. Some embodiments of the binding domain with binding affinity to the marker/antigen CD33 can comprise anti-CD33 VL and VH sequence(s) set forth in Table 6. Some embodiments of the binding domain with binding affinity to the marker/antigen CD33 can comprise VH and VL regions wherein each VH and VL regions can exhibit at least (about) 90%, or at least (about) 91%, or at least (about) 92%, or at least (about) 93%, or at least (about) 94%, or at least (about) 95%, or at least (about) 96%, or at least (about) 97%, or at least (about) 98%, or at least (about) 99% identity to, or is identical to, paired VL and VH sequence(s) of the anti-CD33 antibody/antibodies of Table 6. Some embodiments of the binding domain with binding affinity to the marker/antigen CD33 can comprise the CDR-L1 region, the CDR-L2 region, the CDR-L3 region, the CDR-H1 region, the CDR-H2 region, and the CDR-H3 region, wherein each can be derived from the respective VL and VH sequence(s) set forth in Table 6. In some embodiments of the compositions of this disclosure, the binding domain specific for CD33 can have a K_{d} value of greater than 10⁻⁷ to 10⁻¹⁰ M, as determined using an in vitro binding assay.

### Anti-CD30 Binding Domains:

[0332] In some embodiments of the compositions of this disclosure, the binding domain can have specific binding affinity to the marker/antigen CD30. Some embodiments of the compositions of this disclosure can comprise a bispecific bioactive assembly comprising the binding domain specific for CD30 and another binding domain (e.g., having specific binding affinity to an effector cell). The binding domain can comprise VL and VH derived from a monoclonal antibody to CD30. Monoclonal antibodies to CD30 are known in the art. Some embodiments of the binding domain with binding affinity to the marker/antigen CD30 can comprise anti-CD30 VL and VH sequence(s). Some embodiments of the binding domain with binding affinity to the marker/antigen CD30 can comprise VH and VL regions wherein each VH and VL regions can exhibit at least (about) 90%, or at least (about) 91%, or at least (about) 92%, or at least (about) 93%, or at least (about) 94%, or at least (about) 95%, or at least (about) 96%, or at least (about) 97%, or at least (about) 98%, or at least (about) 99% identity to, or is identical to, paired VL and VH sequence(s) of anti-CD30 antibody/antibodies. Some embodiments of the binding domain with binding affinity to the marker/antigen CD30 can comprise the CDR-L1 region, the CDR-L2 region, the CDR-L3 region, the CDR-H1 region, the CDR-H2 region, and the CDR-H3 region, wherein each can be derived from the respective VL and VH sequence(s). In some embodiments of the compositions of this disclosure, the binding domain specific for CD30 can have a K_{d} value of greater than 10⁻⁷ to 10⁻¹⁰ M, as determined using an in vitro binding assay.

### Anti-Ganglioside GD3 Binding Domains:

[0333] In some embodiments of the compositions of this disclosure, the binding domain can have specific binding affinity to the marker/antigen ganglioside GD3. Some embodiments of the compositions of this disclosure can comprise a bispecific bioactive assembly comprising the binding domain specific for ganglioside GD3 and another binding domain (e.g., having specific binding affinity to an effector cell). The binding domain can comprise VL and VH derived from a monoclonal antibody to ganglioside GD3. Monoclonal antibodies to ganglioside GD3 are known in the art. Some embodiments of the binding domain with binding affinity to the marker/antigen ganglioside GD3 can comprise anti-ganglioside GD3 VL and VH sequence(s). Some embodiments of the binding domain with binding affinity to the marker/antigen ganglioside GD3 can comprise VH and VL regions wherein each VH and VL regions can exhibit at least (about) 90%, or at least (about) 91%, or at least (about) 92%, or at least (about) 93%, or at least (about) 94%, or at least (about) 95%, or at least (about) 96%, or at least (about) 97%, or at least (about) 98%, or at least (about) 99% identity to, or is identical to, paired VL and VH sequence(s) of anti-ganglioside GD3 antibody/antibodies. Some embodiments of the binding domain with binding affinity to the marker/antigen ganglioside GD3 can comprise the CDR-L1 region, the CDR-L2 region, the CDR-L3 region, the CDR-H1 region, the CDR-H2 region, and the CDR-H3 region, wherein each can be derived from the respective VL and VH sequence(s). In some embodiments of the compositions of this disclosure, the binding domain specific for ganglioside GD3 can have a K_{d} value of greater than 10⁻⁷ to 10⁻¹⁰ M, as determined using an in vitro binding assay.

### Anti-9-O-Acetyl-GD3 Binding Domains:

[0334] In some embodiments of the compositions of this disclosure, the binding domain can have specific binding affinity to the marker/antigen 9-O-Acetyl-GD3. Some embodiments of the compositions of this disclosure can comprise a bispecific bioactive assembly comprising the binding domain specific for 9-O-Acetyl-GD3 and another binding domain (e.g., having specific binding affinity to an effector cell). The binding domain can comprise VL and VH derived from a monoclonal antibody to 9-O-Acetyl-GD3. Monoclonal antibodies to 9-O-Acetyl-GD3 are known in the art. Some embodiments of the binding domain with binding affinity to the marker/antigen 9-O-Acetyl-GD3 can comprise anti-9-O-Acetyl-GD3 VL and VH sequence(s). Some embodiments of the binding domain with binding affinity to the marker/antigen 9-O-Acetyl-GD3 can comprise VH and VL regions wherein each VH and VL regions can exhibit at least (about) 90%, or at least (about) 91%, or at least (about) 92%, or at least (about) 93%, or at least (about) 94%, or at least (about) 95%, or at least (about) 96%, or at least (about) 97%, or at least (about) 98%, or at least (about) 99% identity to, or is identical to, paired VL and VH sequence(s) of anti-9-O-Acetyl-GD3 antibody/antibodies. Some embodiments of the binding domain with binding affinity to the marker/antigen 9-O-Acetyl-GD3 can comprise the CDR-L1 region, the CDR-L2 region, the CDR-L3 region, the CDR-H1 region, the CDR-H2 region, and the CDR-H3 region, wherein each can be derived from the respective VL and VH sequence(s). In some embodiments of the compositions of this disclosure, the binding domain specific for 9-O-Acetyl-GD3 can have a K_{d} value of greater than 10⁻⁷ to 10⁻¹⁰ M, as determined using an in vitro binding assay.

### Anti-Globo H Binding Domains:

[0335] In some embodiments of the compositions of this disclosure, the binding domain can have specific binding affinity to the marker/antigen globo H. Some embodiments of the compositions of this disclosure can comprise a bispecific bioactive assembly comprising the binding domain specific for globo H and another binding domain (e.g., having specific binding affinity to an effector cell). The binding domain can comprise VL and VH derived from a monoclonal antibody to globo H. Monoclonal antibodies to globo H are known in the art. Some embodiments of the binding domain with binding affinity to the marker/antigen globo H can comprise anti-globo H VL and VH sequence(s). Some embodiments of the binding domain with binding affinity to the marker/antigen globo H can comprise VH and VL regions wherein each VH and VL regions can exhibit at least (about) 90%, or at least (about) 91%, or at least (about) 92%, or at least (about) 93%, or at least (about) 94%, or at least (about) 95%, or at least (about) 96%, or at least (about) 97%, or at least (about) 98%, or at least (about) 99% identity to, or is identical to, paired VL and VH sequence(s) of anti-globo H antibody/antibodies. Some embodiments of the binding domain with binding affinity to the marker/antigen globo H can comprise the CDR-L1 region, the CDR-L2 region, the CDR-L3 region, the CDR-H1 region, the CDR-H2 region, and the CDR-H3 region, wherein each can be derived from the respective VL and VH sequence(s). In some embodiments of the compositions of this disclosure, the binding domain specific for globo H can have a K_{d} value of greater than 10⁻⁷ to 10⁻¹⁰ M, as determined using an in vitro binding assay.

### Anti-Fucosyl GM1 Binding Domains:

[0336] In some embodiments of the compositions of this disclosure, the binding domain can have specific binding affinity to the marker/antigen fucosyl GM1. Some embodiments of the compositions of this disclosure can comprise a bispecific bioactive assembly comprising the binding domain specific for fucosyl GM1 and another binding domain (e.g., having specific binding affinity to an effector cell). The binding domain can comprise VL and VH derived from a monoclonal antibody to fucosyl GM1. Monoclonal antibodies to fucosyl GM1 are known in the art. Some embodiments of the binding domain with binding affinity to the marker/antigen fucosyl GM1 can comprise anti-fucosyl GM1 VL and VH sequence(s). Some embodiments of the binding domain with binding affinity to the marker/antigen fucosyl GM1 can comprise VH and VL regions wherein each VH and VL regions can exhibit at least (about) 90%, or at least (about) 91%, or at least (about) 92%, or at least (about) 93%, or at least (about) 94%, or at least (about) 95%, or at least (about) 96%, or at least (about) 97%, or at least (about) 98%, or at least (about) 99% identity to, or is identical to, paired VL and VH sequence(s) of anti-fucosyl GM1 antibody/antibodies. Some embodiments of the binding domain with binding affinity to the marker/antigen fucosyl GM1 can comprise the CDR-L1 region, the CDR-L2 region, the CDR-L3 region, the CDR-H1 region, the CDR-H2 region, and the CDR-H3 region, wherein each can be derived from the respective VL and VH sequence(s). In some embodiments of the compositions of this disclosure, the binding domain specific for fucosyl GM1 can have a K_{d} value of greater than 10⁻⁷ to 10⁻¹⁰ M, as determined using an in vitro binding assay.

### Anti-GD2 Binding Domains:

[0337] In some embodiments of the compositions of this disclosure, the binding domain can have specific binding affinity to the marker/antigen GD2. Some embodiments of the compositions of this disclosure can comprise a bispecific bioactive assembly comprising the binding domain specific for GD2 and another binding domain (e.g., having specific binding affinity to an effector cell). The binding domain can comprise VL and VH derived from a monoclonal antibody to GD2. Monoclonal antibodies to GD2 are known in the art. Some embodiments of the binding domain with binding affinity to the marker/antigen GD2 can comprise anti-GD2 VL and VH sequence(s). Some embodiments of the binding domain with binding affinity to the marker/antigen GD2 can comprise VH and VL regions wherein each VH and VL regions can exhibit at least (about) 90%, or at least (about) 91%, or at least (about) 92%, or at least (about) 93%, or at least (about) 94%, or at least (about) 95%, or at least (about) 96%, or at least (about) 97%, or at least (about) 98%, or at least (about) 99% identity to, or is identical to, paired VL and VH sequence(s) of anti-GD2 antibody/antibodies. Some embodiments of the binding domain with binding affinity to the marker/antigen GD2 can comprise the CDR-L1 region, the CDR-L2 region, the CDR-L3 region, the CDR-H1 region, the CDR-H2 region, and the CDR-H3 region, wherein each can be derived from the respective VL and VH sequence(s). In some embodiments of the compositions of this disclosure, the binding domain specific for GD2 can have a K_{d} value of greater than 10⁻⁷ to 10⁻¹⁰ M, as determined using an in vitro binding assay.

### Anti-Carbonicanhydrase IX Binding Domains:

[0338] In some embodiments of the compositions of this disclosure, the binding domain can have specific binding affinity to the marker/antigen CA IX (carbonicanhydrase IX). Some embodiments of the compositions of this disclosure can comprise a bispecific bioactive assembly comprising the binding domain specific for CA IX and another binding domain (e.g., having specific binding affinity to an effector cell). The binding domain can comprise VL and VH derived from a monoclonal antibody to CA IX. Monoclonal antibodies to CA IX are known in the art. Some embodiments of the binding domain with binding affinity to the marker/antigen CA IX can comprise anti-CA IX VL and VH sequence(s). Some embodiments of the binding domain with binding affinity to the marker/antigen CA IX can comprise VH and VL regions wherein each VH and VL regions can exhibit at least (about) 90%, or at least (about) 91%, or at least (about) 92%, or at least (about) 93%, or at least (about) 94%, or at least (about) 95%, or at least (about) 96%, or at least (about) 97%, or at least (about) 98%, or at least (about) 99% identity to, or is identical to, paired VL and VH sequence(s) of anti-CA IX antibody/antibodies. Some embodiments of the binding domain with binding affinity to the marker/antigen CA IX can comprise the CDR-L1 region, the CDR-L2 region, the CDR-L3 region, the CDR-H1 region, the CDR-H2 region, and the CDR-H3 region, wherein each can be derived from the respective VL and VH sequence(s). In some embodiments of the compositions of this disclosure, the binding domain specific for CA IX can have a K_{d} value of greater than 10⁻⁷ to 10⁻¹⁰ M, as determined using an in vitro binding assay.

### Anti-CD44v6 Binding Domains:

[0339] In some embodiments of the compositions of this disclosure, the binding domain can have specific binding affinity to the marker/antigen CD44v6. Some embodiments of the compositions of this disclosure can comprise a bispecific bioactive assembly comprising the binding domain specific for CD44v6 and another binding domain (e.g., having specific binding affinity to an effector cell). The binding domain can comprise VL and VH derived from a monoclonal antibody to CD44v6. Monoclonal antibodies to CD44v6 are known in the art. Some embodiments of the binding domain with binding affinity to the marker/antigen CD44v6 can comprise anti-CD44v6 VL and VH sequence(s). Some embodiments of the binding domain with binding affinity to the marker/antigen CD44v6 can comprise VH and VL regions wherein each VH and VL regions can exhibit at least (about) 90%, or at least (about) 91%, or at least (about) 92%, or at least (about) 93%, or at least (about) 94%, or at least (about) 95%, or at least (about) 96%, or at least (about) 97%, or at least (about) 98%, or at least (about) 99% identity to, or is identical to, paired VL and VH sequence(s) of anti-CD44v6 antibody/antibodies. Some embodiments of the binding domain with binding affinity to the marker/antigen CD44v6 can comprise the CDR-L1 region, the CDR-L2 region, the CDR-L3 region, the CDR-H1 region, the CDR-H2 region, and the CDR-H3 region, wherein each can be derived from the respective VL and VH sequence(s). In some embodiments of the compositions of this disclosure, the binding domain specific for CD44v6 can have a K_{d} value of greater than 10⁻⁷ to 10⁻¹⁰ M, as determined using an in vitro binding assay.

### Anti-Sonic Hedgehog (Shh) Binding Domains:

[0340] In some embodiments of the compositions of this disclosure, the binding domain can have specific binding affinity to the marker/antigen Shh (sonic hedgehog). Some embodiments of the compositions of this disclosure can comprise a bispecific bioactive assembly comprising the binding domain specific for Shh and another binding domain (e.g., having specific binding affinity to an effector cell). The binding domain can comprise VL and VH derived from a monoclonal antibody to Shh. Monoclonal antibodies to Shh are known in the art. Some embodiments of the binding domain with binding affinity to the marker/antigen Shh can comprise anti-Shh VL and VH sequence(s). Some embodiments of the binding domain with binding affinity to the marker/antigen Shh can comprise VH and VL regions wherein each VH and VL regions can exhibit at least (about) 90%, or at least (about) 91%, or at least (about) 92%, or at least (about) 93%, or at least (about) 94%, or at least (about) 95%, or at least (about) 96%, or at least (about) 97%, or at least (about) 98%, or at least (about) 99% identity to, or is identical to, paired VL and VH sequence(s) of anti-Shh antibody/antibodies. Some embodiments of the binding domain with binding affinity to the marker/antigen Shh can comprise the CDR-L1 region, the CDR-L2 region, the CDR-L3 region, the CDR-H1 region, the CDR-H2 region, and the CDR-H3 region, wherein each can be derived from the respective VL and VH sequence(s). In some embodiments of the compositions of this disclosure, the binding domain specific for Shh can have a K_{d} value of greater than 10⁻⁷ to 10⁻¹⁰ M, as determined using an in vitro binding assay.

### Anti-Wue-1 Binding Domains:

[0341] In some embodiments of the compositions of this disclosure, the binding domain can have specific binding affinity to the marker/antigen Wue-1. Some embodiments of the compositions of this disclosure can comprise a bispecific bioactive assembly comprising the binding domain specific for Wue-1 and another binding domain (e.g., having specific binding affinity to an effector cell). The binding domain can comprise VL and VH derived from a monoclonal antibody to Wue-1. Monoclonal antibodies to Wue-1 are known in the art. Some embodiments of the binding domain with binding affinity to the marker/antigen Wue-1 can comprise anti-Wue-1 VL and VH sequence(s). Some embodiments of the binding domain with binding affinity to the marker/antigen Wue-1 can comprise VH and VL regions wherein each VH and VL regions can exhibit at least (about) 90%, or at least (about) 91%, or at least (about) 92%, or at least (about) 93%, or at least (about) 94%, or at least (about) 95%, or at least (about) 96%, or at least (about) 97%, or at least (about) 98%, or at least (about) 99% identity to, or is identical to, paired VL and VH sequence(s) of anti-Wue-1 antibody/antibodies. Some embodiments of the binding domain with binding affinity to the marker/antigen Wue-1 can comprise the CDR-L1 region, the CDR-L2 region, the CDR-L3 region, the CDR-H1 region, the CDR-H2 region, and the CDR-H3 region, wherein each can be derived from the respective VL and VH sequence(s). In some embodiments of the compositions of this disclosure, the binding domain specific for Wue-1 can have a K_{d} value of greater than 10⁻⁷ to 10⁻¹⁰ M, as determined using an in vitro binding assay.

### Anti-Plasma Cell Antigen 1 (PC-1) Binding Domains:

[0342] In some embodiments of the compositions of this disclosure, the binding domain can have specific binding affinity to the marker/antigen PC-1 (plasma cell antigen). Some embodiments of the compositions of this disclosure can comprise a bispecific bioactive assembly comprising the binding domain specific for PC-1 (plasma cell antigen) and another binding domain (e.g., having specific binding affinity to an effector cell). The binding domain can comprise VL and VH derived from a monoclonal antibody to PC-1 (plasma cell antigen). Monoclonal antibodies to PC-1 (plasma cell antigen) are known in the art. Some embodiments of the binding domain with binding affinity to the marker/antigen PC-1 (plasma cell antigen) can comprise anti-PC-1 (plasma cell antigen) VL and VH sequence(s). Some embodiments of the binding domain with binding affinity to the marker/antigen PC-1 (plasma cell antigen) can comprise VH and VL regions wherein each VH and VL regions can exhibit at least (about) 90%, or at least (about) 91%, or at least (about) 92%, or at least (about) 93%, or at least (about) 94%, or at least (about) 95%, or at least (about) 96%, or at least (about) 97%, or at least (about) 98%, or at least (about) 99% identity to, or is identical to, paired VL and VH sequence(s) of anti-PC-1 (plasma cell antigen) antibody/antibodies. Some embodiments of the binding domain with binding affinity to the marker/antigen PC-1 (plasma cell antigen) can comprise the CDR-L1 region, the CDR-L2 region, the CDR-L3 region, the CDR-H1 region, the CDR-H2 region, and the CDR-H3 region, wherein each can be derived from the respective VL and VH sequence(s). In some embodiments of the compositions of this disclosure, the binding domain specific for PC-1 (plasma cell antigen) can have a K_{d} value of greater than 10⁻⁷ to 10⁻¹⁰ M, as determined using an in vitro binding assay.

### Anti-Melanoma Chondroitin Sulfate Proteoglycan (MCSP) Binding Domains:

[0343] In some embodiments of the compositions of this disclosure, the binding domain can have specific binding affinity to the marker/antigen MCSP (melanoma chondroitin sulfate proteoglycan). Some embodiments of the compositions of this disclosure can comprise a bispecific bioactive assembly comprising the binding domain specific for MCSP and another binding domain (e.g., having specific binding affinity to an effector cell). The binding domain can comprise VL and VH derived from a monoclonal antibody to MCSP. Monoclonal antibodies to MCSP are known in the art. Some embodiments of the binding domain with binding affinity to the marker/antigen MCSP can comprise anti-MCSP VL and VH sequence(s). Some embodiments of the binding domain with binding affinity to the marker/antigen MCSP can comprise VH and VL regions wherein each VH and VL regions can exhibit at least (about) 90%, or at least (about) 91%, or at least (about) 92%, or at least (about) 93%, or at least (about) 94%, or at least (about) 95%, or at least (about) 96%, or at least (about) 97%, or at least (about) 98%, or at least (about) 99% identity to, or is identical to, paired VL and VH sequence(s) of anti-MCSP antibody/antibodies. Some embodiments of the binding domain with binding affinity to the marker/antigen MCSP can comprise the CDR-L1 region, the CDR-L2 region, the CDR-L3 region, the CDR-H1 region, the CDR-H2 region, and the CDR-H3 region, wherein each can be derived from the respective VL and VH sequence(s). In some embodiments of the compositions of this disclosure, the binding domain specific for MCSP can have a K_{d} value of greater than 10⁻⁷ to 10⁻¹⁰ M, as determined using an in vitro binding assay.

### Anti-CCR8 Binding Domains:

[0344] In some embodiments of the compositions of this disclosure, the binding domain can have specific binding affinity to the marker/antigen CCR8. Some embodiments of the compositions of this disclosure can comprise a bispecific bioactive assembly comprising the binding domain specific for CCR8 and another binding domain (e.g., having specific binding affinity to an effector cell). The binding domain can comprise VL and VH derived from a monoclonal antibody to CCR8. Monoclonal antibodies to CCR8 are known in the art. Some embodiments of the binding domain with binding affinity to the marker/antigen CCR8 can comprise anti-CCR8 VL and VH sequence(s). Some embodiments of the binding domain with binding affinity to the marker/antigen CCR8 can comprise VH and VL regions wherein each VH and VL regions can exhibit at least (about) 90%, or at least (about) 91%, or at least (about) 92%, or at least (about) 93%, or at least (about) 94%, or at least (about) 95%, or at least (about) 96%, or at least (about) 97%, or at least (about) 98%, or at least (about) 99% identity to, or is identical to, paired VL and VH sequence(s) of anti-CCR8 antibody/antibodies. Some embodiments of the binding domain with binding affinity to the marker/antigen CCR8 can comprise the CDR-L1 region, the CDR-L2 region, the CDR-L3 region, the CDR-H1 region, the CDR-H2 region, and the CDR-H3 region, wherein each can be derived from the respective VL and VH sequence(s). In some embodiments of the compositions of this disclosure, the binding domain specific for CCR8 can have a K_{d} value of greater than 10⁻⁷ to 10⁻¹⁰ M, as determined using an in vitro binding assay.

### Anti-6-Transmembrane Epithelial Antigen of Prostate (STEAP) Binding Domains:

[0345] In some embodiments of the compositions of this disclosure, the binding domain can have specific binding affinity to the marker/antigen STEAP. Some embodiments of the compositions of this disclosure can comprise a bispecific bioactive assembly comprising the binding domain specific for STEAP and another binding domain (e.g., having specific binding affinity to an effector cell). The binding domain can comprise VL and VH derived from a monoclonal antibody to STEAP. Monoclonal antibodies to STEAP are known in the art. Some embodiments of the binding domain with binding affinity to the marker/antigen STEAP can comprise anti-STEAP VL and VH sequence(s). Some embodiments of the binding domain with binding affinity to the marker/antigen STEAP can comprise VH and VL regions wherein each VH and VL regions can exhibit at least (about) 90%, or at least (about) 91%, or at least (about) 92%, or at least (about) 93%, or at least (about) 94%, or at least (about) 95%, or at least (about) 96%, or at least (about) 97%, or at least (about) 98%, or at least (about) 99% identity to, or is identical to, paired VL and VH sequence(s) of anti-STEAP antibody/antibodies. Some embodiments of the binding domain with binding affinity to the marker/antigen STEAP can comprise the CDR-L1 region, the CDR-L2 region, the CDR-L3 region, the CDR-H1 region, the CDR-H2 region, and the CDR-H3 region, wherein each can be derived from the respective VL and VH sequence(s). In some embodiments of the compositions of this disclosure, the binding domain specific for STEAP can have a K_{d} value of greater than 10⁻⁷ to 10⁻¹⁰ M, as determined using an in vitro binding assay.

### Anti-Mesothelin Binding Domains:

[0346] In some embodiments of the compositions of this disclosure, the binding domain can have specific binding affinity to the marker/antigen mesothelin. Some embodiments of the compositions of this disclosure can comprise a bispecific bioactive assembly comprising the binding domain specific for mesothelin and another binding domain (e.g., having specific binding affinity to an effector cell). The binding domain can comprise VL and VH derived from a monoclonal antibody to mesothelin. Monoclonal antibodies to mesothelin are known in the art. Exemplary, non-limiting example(s) of mesothelin monoclonal antibodies and the VL and VH sequences thereof are presented in Table 6. Some embodiments of the binding domain with binding affinity to the marker/antigen mesothelin can comprise anti-mesothelin VL and VH sequence(s) set forth in Table 6. Some embodiments of the binding domain with binding affinity to the marker/antigen mesothelin can comprise VH and VL regions wherein each VH and VL regions can exhibit at least (about) 90%, or at least (about) 91%, or at least (about) 92%, or at least (about) 93%, or at least (about) 94%, or at least (about) 95%, or at least (about) 96%, or at least (about) 97%, or at least (about) 98%, or at least (about) 99% identity to, or is identical to, paired VL and VH sequence(s) of the anti-mesothelin antibody/antibodies of Table 6. Some embodiments of the binding domain with binding affinity to the marker/antigen mesothelin can comprise the CDR-L1 region, the CDR-L2 region, the CDR-L3 region, the CDR-H1 region, the CDR-H2 region, and the CDR-H3 region, wherein each can be derived from the respective VL and VH sequence(s) set forth in Table 6. In some embodiments of the compositions of this disclosure, the binding domain specific for mesothelin can have a K_{d} value of greater than 10⁻⁷ to 10⁻¹⁰ M, as determined using an in vitro binding assay.

### Anti-A33 Antigen Binding Domains:

[0347] In some embodiments of the compositions of this disclosure, the binding domain can have specific binding affinity to the marker/antigen A33. Some embodiments of the compositions of this disclosure can comprise a bispecific bioactive assembly comprising the binding domain specific for A33 and another binding domain (e.g., having specific binding affinity to an effector cell). The binding domain can comprise VL and VH derived from a monoclonal antibody to A33. Monoclonal antibodies to A33 are known in the art. Some embodiments of the binding domain with binding affinity to the marker/antigen A33 can comprise anti-A33 VL and VH sequence(s). Some embodiments of the binding domain with binding affinity to the marker/antigen A33 can comprise VH and VL regions wherein each VH and VL regions can exhibit at least (about) 90%, or at least (about) 91%, or at least (about) 92%, or at least (about) 93%, or at least (about) 94%, or at least (about) 95%, or at least (about) 96%, or at least (about) 97%, or at least (about) 98%, or at least (about) 99% identity to, or is identical to, paired VL and VH sequence(s) of anti-A33 antibody/antibodies. Some embodiments of the binding domain with binding affinity to the marker/antigen A33 can comprise the CDR-L1 region, the CDR-L2 region, the CDR-L3 region, the CDR-H1 region, the CDR-H2 region, and the CDR-H3 region, wherein each can be derived from the respective VL and VH sequence(s). In some embodiments of the compositions of this disclosure, the binding domain specific for A33 can have a K_{d} value of greater than 10⁻⁷ to 10⁻¹⁰ M, as determined using an in vitro binding assay.

### Anti-PSCA Binding Domains:

[0348] In some embodiments of the compositions of this disclosure, the binding domain can have specific binding affinity to the marker/antigen PSCA. Some embodiments of the compositions of this disclosure can comprise a bispecific bioactive assembly comprising the binding domain specific for PSCA and another binding domain (e.g., having specific binding affinity to an effector cell). The binding domain can comprise VL and VH derived from a monoclonal antibody to PSCA. Monoclonal antibodies to PSCA are known in the art. Some embodiments of the binding domain with binding affinity to the marker/antigen PSCA can comprise anti-PSCA VL and VH sequence(s). Some embodiments of the binding domain with binding affinity to the marker/antigen PSCA can comprise VH and VL regions wherein each VH and VL regions can exhibit at least (about) 90%, or at least (about) 91%, or at least (about) 92%, or at least (about) 93%, or at least (about) 94%, or at least (about) 95%, or at least (about) 96%, or at least (about) 97%, or at least (about) 98%, or at least (about) 99% identity to, or is identical to, paired VL and VH sequence(s) of anti-PSCA antibody/antibodies. Some embodiments of the binding domain with binding affinity to the marker/antigen PSCA can comprise the CDR-L1 region, the CDR-L2 region, the CDR-L3 region, the CDR-H1 region, the CDR-H2 region, and the CDR-H3 region, wherein each can be derived from the respective VL and VH sequence(s). In some embodiments of the compositions of this disclosure, the binding domain specific for PSCA can have a K_{d} value of greater than 10⁻⁷ to 10⁻¹⁰ M, as determined using an in vitro binding assay.

### Anti-Ly-6 Binding Domains:

[0349] In some embodiments of the compositions of this disclosure, the binding domain can have specific binding affinity to the marker/antigen Ly-6. Some embodiments of the compositions of this disclosure can comprise a bispecific bioactive assembly comprising the binding domain specific for Ly-6 and another binding domain (e.g., having specific binding affinity to an effector cell). The binding domain can comprise VL and VH derived from a monoclonal antibody to Ly-6. Monoclonal antibodies to Ly-6 are known in the art. Some embodiments of the binding domain with binding affinity to the marker/antigen Ly-6 can comprise anti-Ly-6 VL and VH sequence(s). Some embodiments of the binding domain with binding affinity to the marker/antigen Ly-6 can comprise VH and VL regions wherein each VH and VL regions can exhibit at least (about) 90%, or at least (about) 91%, or at least (about) 92%, or at least (about) 93%, or at least (about) 94%, or at least (about) 95%, or at least (about) 96%, or at least (about) 97%, or at least (about) 98%, or at least (about) 99% identity to, or is identical to, paired VL and VH sequence(s) of anti-Ly-6 antibody/antibodies. Some embodiments of the binding domain with binding affinity to the marker/antigen Ly-6 can comprise the CDR-L1 region, the CDR-L2 region, the CDR-L3 region, the CDR-H1 region, the CDR-H2 region, and the CDR-H3 region, wherein each can be derived from the respective VL and VH sequence(s). In some embodiments of the compositions of this disclosure, the binding domain specific for Ly-6 can have a K_{d} value of greater than 10⁻⁷ to 10⁻¹⁰ M, as determined using an in vitro binding assay.

### Anti-SAS Binding Domains:

[0350] In some embodiments of the compositions of this disclosure, the binding domain can have specific binding affinity to the marker/antigen SAS. Some embodiments of the compositions of this disclosure can comprise a bispecific bioactive assembly comprising the binding domain specific for SAS and another binding domain (e.g., having specific binding affinity to an effector cell). The binding domain can comprise VL and VH derived from a monoclonal antibody to SAS. Monoclonal antibodies to SAS are known in the art. Some embodiments of the binding domain with binding affinity to the marker/antigen SAS can comprise anti-SAS VL and VH sequence(s). Some embodiments of the binding domain with binding affinity to the marker/antigen SAS can comprise VH and VL regions wherein each VH and VL regions can exhibit at least (about) 90%, or at least (about) 91%, or at least (about) 92%, or at least (about) 93%, or at least (about) 94%, or at least (about) 95%, or at least (about) 96%, or at least (about) 97%, or at least (about) 98%, or at least (about) 99% identity to, or is identical to, paired VL and VH sequence(s) of anti-SAS antibody/antibodies. Some embodiments of the binding domain with binding affinity to the marker/antigen SAS can comprise the CDR-L1 region, the CDR-L2 region, the CDR-L3 region, the CDR-H1 region, the CDR-H2 region, and the CDR-H3 region, wherein each can be derived from the respective VL and VH sequence(s). In some embodiments of the compositions of this disclosure, the binding domain specific for SAS can have a K_{d} value of greater than 10⁻⁷ to 10⁻¹⁰ M, as determined using an in vitro binding assay.

### Anti-Desmoglein 4 Binding Domains:

[0351] In some embodiments of the compositions of this disclosure, the binding domain can have specific binding affinity to the marker/antigen desmoglein 4. Some embodiments of the compositions of this disclosure can comprise a bispecific bioactive assembly comprising the binding domain specific for desmoglein 4 and another binding domain (e.g., having specific binding affinity to an effector cell). The binding domain can comprise VL and VH derived from a monoclonal antibody to desmoglein 4. Monoclonal antibodies to desmoglein 4 are known in the art. Some embodiments of the binding domain with binding affinity to the marker/antigen desmoglein 4 can comprise anti-desmoglein 4 VL and VH sequence(s). Some embodiments of the binding domain with binding affinity to the marker/antigen desmoglein 4 can comprise VH and VL regions wherein each VH and VL regions can exhibit at least (about) 90%, or at least (about) 91%, or at least (about) 92%, or at least (about) 93%, or at least (about) 94%, or at least (about) 95%, or at least (about) 96%, or at least (about) 97%, or at least (about) 98%, or at least (about) 99% identity to, or is identical to, paired VL and VH sequence(s) of anti-desmoglein 4 antibody/antibodies. Some embodiments of the binding domain with binding affinity to the marker/antigen desmoglein 4 can comprise the CDR-L1 region, the CDR-L2 region, the CDR-L3 region, the CDR-H1 region, the CDR-H2 region, and the CDR-H3 region, wherein each can be derived from the respective VL and VH sequence(s). In some embodiments of the compositions of this disclosure, the binding domain specific for desmoglein 4 can have a K_{d} value of greater than 10⁻⁷ to 10⁻¹⁰ M, as determined using an in vitro binding assay.

### Anti-fnAChR (Fetal Acetylcholine Receptor) Binding Domains:

[0352] In some embodiments of the compositions of this disclosure, the binding domain can have specific binding affinity to the marker/antigen fnAChR (fetal acetylcholine receptor). Some embodiments of the compositions of this disclosure can comprise a bispecific bioactive assembly comprising the binding domain specific for fnAChR and another binding domain (e.g., having specific binding affinity to an effector cell). The binding domain can comprise VL and VH derived from a monoclonal antibody to fnAChR. Monoclonal antibodies to fnAChR are known in the art. Some embodiments of the binding domain with binding affinity to the marker/antigen fnAChR can comprise anti-fnAChR VL and VH sequence(s). Some embodiments of the binding domain with binding affinity to the marker/antigen fnAChR can comprise VH and VL regions wherein each VH and VL regions can exhibit at least (about) 90%, or at least (about) 91%, or at least (about) 92%, or at least (about) 93%, or at least (about) 94%, or at least (about) 95%, or at least (about) 96%, or at least (about) 97%, or at least (about) 98%, or at least (about) 99% identity to, or is identical to, paired VL and VH sequence(s) of anti-fnAChR antibody/antibodies. Some embodiments of the binding domain with binding affinity to the marker/antigen fnAChR can comprise the CDR-L1 region, the CDR-L2 region, the CDR-L3 region, the CDR-H1 region, the CDR-H2 region, and the CDR-H3 region, wherein each can be derived from the respective VL and VH sequence(s). In some embodiments of the compositions of this disclosure, the binding domain specific for fnAChR can have a K_{d} value of greater than 10⁻⁷ to 10⁻¹⁰ M, as determined using an in vitro binding assay.

### Anti-CD25 Binding Domains:

[0353] In some embodiments of the compositions of this disclosure, the binding domain can have specific binding affinity to the marker/antigen CD25. Some embodiments of the compositions of this disclosure can comprise a bispecific bioactive assembly comprising the binding domain specific for CD25 and another binding domain (e.g., having specific binding affinity to an effector cell). The binding domain can comprise VL and VH derived from a monoclonal antibody to CD25. Monoclonal antibodies to CD25 are known in the art. Some embodiments of the binding domain with binding affinity to the marker/antigen CD25 can comprise anti-CD25 VL and VH sequence(s). Some embodiments of the binding domain with binding affinity to the marker/antigen CD25 can comprise VH and VL regions wherein each VH and VL regions can exhibit at least (about) 90%, or at least (about) 91%, or at least (about) 92%, or at least (about) 93%, or at least (about) 94%, or at least (about) 95%, or at least (about) 96%, or at least (about) 97%, or at least (about) 98%, or at least (about) 99% identity to, or is identical to, paired VL and VH sequence(s) of anti-CD25 antibody/antibodies. Some embodiments of the binding domain with binding affinity to the marker/antigen CD25 can comprise the CDR-L1 region, the CDR-L2 region, the CDR-L3 region, the CDR-H1 region, the CDR-H2 region, and the CDR-H3 region, wherein each can be derived from the respective VL and VH sequence(s). In some embodiments of the compositions of this disclosure, the binding domain specific for CD25 can have a K_{d} value of greater than 10⁻⁷ to 10⁻¹⁰ M, as determined using an in vitro binding assay.

### Anti-Cancer Antigen 19-9 Binding Domains:

[0354] In some embodiments of the compositions of this disclosure, the binding domain can have specific binding affinity to the marker/antigen cancer antigen 19-9. Some embodiments of the compositions of this disclosure can comprise a bispecific bioactive assembly comprising the binding domain specific for cancer antigen 19-9 and another binding domain (e.g., having specific binding affinity to an effector cell). The binding domain can comprise VL and VH derived from a monoclonal antibody to cancer antigen 19-9. Monoclonal antibodies to cancer antigen 19-9 are known in the art. Some embodiments of the binding domain with binding affinity to the marker/antigen cancer antigen 19-9 can comprise anti-cancer antigen 19-9 VL and VH sequence(s). Some embodiments of the binding domain with binding affinity to the marker/antigen cancer antigen 19-9 can comprise VH and VL regions wherein each VH and VL regions can exhibit at least (about) 90%, or at least (about) 91%, or at least (about) 92%, or at least (about) 93%, or at least (about) 94%, or at least (about) 95%, or at least (about) 96%, or at least (about) 97%, or at least (about) 98%, or at least (about) 99% identity to, or is identical to, paired VL and VH sequence(s) of anti-cancer antigen 19-9 antibody/antibodies. Some embodiments of the binding domain with binding affinity to the marker/antigen cancer antigen 19-9 can comprise the CDR-L1 region, the CDR-L2 region, the CDR-L3 region, the CDR-H1 region, the CDR-H2 region, and the CDR-H3 region, wherein each can be derived from the respective VL and VH sequence(s). In some embodiments of the compositions of this disclosure, the binding domain specific for cancer antigen 19-9 (CA 19-9) can have a K_{d} value of greater than 10⁻⁷ to 10⁻¹⁰ M, as determined using an in vitro binding assay.

### Anti-Misiir Binding Domains:

[0355] In some embodiments of the compositions of this disclosure, the binding domain can have specific binding affinity to the marker/antigen MISIIR (müllerian inhibiting substance type II receptor). Some embodiments of the compositions of this disclosure can comprise a bispecific bioactive assembly comprising the binding domain specific for MISIIR and another binding domain (e.g., having specific binding affinity to an effector cell). The binding domain can comprise VL and VH derived from a monoclonal antibody to MISIIR. Monoclonal antibodies to MISIIR are known in the art. Some embodiments of the binding domain with binding affinity to the marker/antigen MISIIR can comprise anti-MISIIR VL and VH sequence(s). Some embodiments of the binding domain with binding affinity to the marker/antigen MISIIR can comprise VH and VL regions wherein each VH and VL regions can exhibit at least (about) 90%, or at least (about) 91%, or at least (about) 92%, or at least (about) 93%, or at least (about) 94%, or at least (about) 95%, or at least (about) 96%, or at least (about) 97%, or at least (about) 98%, or at least (about) 99% identity to, or is identical to, paired VL and VH sequence(s) of anti-MISIIR antibody/antibodies. Some embodiments of the binding domain with binding affinity to the marker/antigen MISIIR can comprise the CDR-L1 region, the CDR-L2 region, the CDR-L3 region, the CDR-H1 region, the CDR-H2 region, and the CDR-H3 region, wherein each can be derived from the respective VL and VH sequence(s). In some embodiments of the compositions of this disclosure, the binding domain specific for MISIIR can have a K_{d} value of greater than 10⁻⁷ to 10⁻¹⁰ M, as determined using an in vitro binding assay.

### Anti-sTn (Sialylated Tn Antigen) Binding Domains:

[0356] In some embodiments of the compositions of this disclosure, the binding domain can have specific binding affinity to the marker/antigen sTn (sialylated to antigen). Some embodiments of the compositions of this disclosure can comprise a bispecific bioactive assembly comprising the binding domain specific for sTn and another binding domain (e.g., having specific binding affinity to an effector cell). The binding domain can comprise VL and VH derived from a monoclonal antibody to sTn. Monoclonal antibodies to sTn are known in the art. Some embodiments of the binding domain with binding affinity to the marker/antigen sTn can comprise anti-sTn VL and VH sequence(s). Some embodiments of the binding domain with binding affinity to the marker/antigen sTn can comprise VH and VL regions wherein each VH and VL regions can exhibit at least (about) 90%, or at least (about) 91%, or at least (about) 92%, or at least (about) 93%, or at least (about) 94%, or at least (about) 95%, or at least (about) 96%, or at least (about) 97%, or at least (about) 98%, or at least (about) 99% identity to, or is identical to, paired VL and VH sequence(s) of anti-sTn antibody/antibodies. Some embodiments of the binding domain with binding affinity to the marker/antigen sTn can comprise the CDR-L1 region, the CDR-L2 region, the CDR-L3 region, the CDR-H1 region, the CDR-H2 region, and the CDR-H3 region, wherein each can be derived from the respective VL and VH sequence(s). In some embodiments of the compositions of this disclosure, the binding domain specific for sTn can have a K_{d} value of greater than 10⁻⁷ to 10⁻¹⁰ M, as determined using an in vitro binding assay.

### Anti-FAP Binding Domains:

[0357] In some embodiments of the compositions of this disclosure, the binding domain can have specific binding affinity to the marker/antigen FAP. Some embodiments of the compositions of this disclosure can comprise a bispecific bioactive assembly comprising the binding domain specific for FAP and another binding domain (e.g., having specific binding affinity to an effector cell). The binding domain can comprise VL and VH derived from a monoclonal antibody to FAP. Monoclonal antibodies to FAP are known in the art. Some embodiments of the binding domain with binding affinity to the marker/antigen FAP can comprise anti-FAP VL and VH sequence(s). Some embodiments of the binding domain with binding affinity to the marker/antigen FAP can comprise VH and VL regions wherein each VH and VL regions can exhibit at least (about) 90%, or at least (about) 91%, or at least (about) 92%, or at least (about) 93%, or at least (about) 94%, or at least (about) 95%, or at least (about) 96%, or at least (about) 97%, or at least (about) 98%, or at least (about) 99% identity to, or is identical to, paired VL and VH sequence(s) of anti-FAP antibody/antibodies. Some embodiments of the binding domain with binding affinity to the marker/antigen FAP can comprise the CDR-L1 region, the CDR-L2 region, the CDR-L3 region, the CDR-H1 region, the CDR-H2 region, and the CDR-H3 region, wherein each can be derived from the respective VL and VH sequence(s). In some embodiments of the compositions of this disclosure, the binding domain specific for FAP can have a K_{d} value of greater than 10⁻⁷ to 10⁻¹⁰ M, as determined using an in vitro binding assay.

### Anti-CD248 Binding Domains:

[0358] In some embodiments of the compositions of this disclosure, the binding domain can have specific binding affinity to the marker/antigen CD248. Some embodiments of the compositions of this disclosure can comprise a bispecific bioactive assembly comprising the binding domain specific for CD248 and another binding domain (e.g., having specific binding affinity to an effector cell). The binding domain can comprise VL and VH derived from a monoclonal antibody to CD248. Monoclonal antibodies to CD248 are known in the art. Some embodiments of the binding domain with binding affinity to the marker/antigen CD248 can comprise anti-CD248 VL and VH sequence(s). Some embodiments of the binding domain with binding affinity to the marker/antigen CD248 can comprise VH and VL regions wherein each VH and VL regions can exhibit at least (about) 90%, or at least (about) 91%, or at least (about) 92%, or at least (about) 93%, or at least (about) 94%, or at least (about) 95%, or at least (about) 96%, or at least (about) 97%, or at least (about) 98%, or at least (about) 99% identity to, or is identical to, paired VL and VH sequence(s) of anti-CD248 antibody/antibodies. Some embodiments of the binding domain with binding affinity to the marker/antigen CD248 can comprise the CDR-L1 region, the CDR-L2 region, the CDR-L3 region, the CDR-H1 region, the CDR-H2 region, and the CDR-H3 region, wherein each can be derived from the respective VL and VH sequence(s). In some embodiments of the compositions of this disclosure, the binding domain specific for CD248 can have a K_{d} value of greater than 10⁻⁷ to 10⁻¹⁰ M, as determined using an in vitro binding assay.

### Anti-EGFRvIII Binding Domains:

[0359] In some embodiments of the compositions of this disclosure, the binding domain can have specific binding affinity to the marker/antigen EGFRvIII. Some embodiments of the compositions of this disclosure can comprise a bispecific bioactive assembly comprising the binding domain specific for EGFRvIII and another binding domain (e.g., having specific binding affinity to an effector cell). The binding domain can comprise VL and VH derived from a monoclonal antibody to EGFRvIII. Monoclonal antibodies to EGFRvIII are known in the art. Some embodiments of the binding domain with binding affinity to the marker/antigen EGFRvIII can comprise anti-EGFRvIII VL and VH sequence(s). Some embodiments of the binding domain with binding affinity to the marker/antigen EGFRvIII can comprise VH and VL regions wherein each VH and VL regions can exhibit at least (about) 90%, or at least (about) 91%, or at least (about) 92%, or at least (about) 93%, or at least (about) 94%, or at least (about) 95%, or at least (about) 96%, or at least (about) 97%, or at least (about) 98%, or at least (about) 99% identity to, or is identical to, paired VL and VH sequence(s) of anti-EGFRvIII antibody/antibodies. Some embodiments of the binding domain with binding affinity to the marker/antigen EGFRvIII can comprise the CDR-L1 region, the CDR-L2 region, the CDR-L3 region, the CDR-H1 region, the CDR-H2 region, and the CDR-H3 region, wherein each can be derived from the respective VL and VH sequence(s). In some embodiments of the compositions of this disclosure, the binding domain specific for EGFRvIII can have a K_{d} value of greater than 10⁻⁷ to 10⁻¹⁰ M, as determined using an in vitro binding assay.

### Anti-TAL6 Binding Domains:

[0360] In some embodiments of the compositions of this disclosure, the binding domain can have specific binding affinity to the marker/antigen TAL6. Some embodiments of the compositions of this disclosure can comprise a bispecific bioactive assembly comprising the binding domain specific for TAL6 and another binding domain (e.g., having specific binding affinity to an effector cell). The binding domain can comprise VL and VH derived from a monoclonal antibody to TAL6. Monoclonal antibodies to TAL6 are known in the art. Some embodiments of the binding domain with binding affinity to the marker/antigen TAL6 can comprise anti-TAL6 VL and VH sequence(s). Some embodiments of the binding domain with binding affinity to the marker/antigen TAL6 can comprise VH and VL regions wherein each VH and VL regions can exhibit at least (about) 90%, or at least (about) 91%, or at least (about) 92%, or at least (about) 93%, or at least (about) 94%, or at least (about) 95%, or at least (about) 96%, or at least (about) 97%, or at least (about) 98%, or at least (about) 99% identity to, or is identical to, paired VL and VH sequence(s) of anti-TAL6 antibody/antibodies. Some embodiments of the binding domain with binding affinity to the marker/antigen TAL6 can comprise the CDR-L1 region, the CDR-L2 region, the CDR-L3 region, the CDR-H1 region, the CDR-H2 region, and the CDR-H3 region, wherein each can be derived from the respective VL and VH sequence(s). In some embodiments of the compositions of this disclosure, the binding domain specific for TAL6 can have a K_{d} value of greater than 10⁻⁷ to 10⁻¹⁰ M, as determined using an in vitro binding assay.

### Anti-CD63 Binding Domains:

[0361] In some embodiments of the compositions of this disclosure, the binding domain can have specific binding affinity to the marker/antigen CD63. Some embodiments of the compositions of this disclosure can comprise a bispecific bioactive assembly comprising the binding domain specific for CD63 and another binding domain (e.g., having specific binding affinity to an effector cell). The binding domain can comprise VL and VH derived from a monoclonal antibody to CD63. Monoclonal antibodies to CD63 are known in the art. Some embodiments of the binding domain with binding affinity to the marker/antigen CD63 can comprise anti-CD63 VL and VH sequence(s). Some embodiments of the binding domain with binding affinity to the marker/antigen CD63 can comprise VH and VL regions wherein each VH and VL regions can exhibit at least (about) 90%, or at least (about) 91%, or at least (about) 92%, or at least (about) 93%, or at least (about) 94%, or at least (about) 95%, or at least (about) 96%, or at least (about) 97%, or at least (about) 98%, or at least (about) 99% identity to, or is identical to, paired VL and VH sequence(s) of anti-CD63 antibody/antibodies. Some embodiments of the binding domain with binding affinity to the marker/antigen CD63 can comprise the CDR-L1 region, the CDR-L2 region, the CDR-L3 region, the CDR-H1 region, the CDR-H2 region, and the CDR-H3 region, wherein each can be derived from the respective VL and VH sequence(s). In some embodiments of the compositions of this disclosure, the binding domain specific for CD63 can have a K_{d} value of greater than 10⁻⁷ to 10⁻¹⁰ M, as determined using an in vitro binding assay.

### Anti-TAG72 Binding Domains:

[0362] In some embodiments of the compositions of this disclosure, the binding domain can have specific binding affinity to the marker/antigen TAG72. Some embodiments of the compositions of this disclosure can comprise a bispecific bioactive assembly comprising the binding domain specific for TAG72 and another binding domain (e.g., having specific binding affinity to an effector cell). The binding domain can comprise VL and VH derived from a monoclonal antibody to TAG72. Monoclonal antibodies to TAG72 are known in the art. Exemplary, non-limiting example(s) of TAG72 monoclonal antibodies and the VL and VH sequences thereof are presented in Table 6. Some embodiments of the binding domain with binding affinity to the marker/antigen TAG72 can comprise anti-TAG72 VL and VH sequence(s) set forth in Table 6. Some embodiments of the binding domain with binding affinity to the marker/antigen TAG72 can comprise VH and VL regions wherein each VH and VL regions can exhibit at least (about) 90%, or at least (about) 91%, or at least (about) 92%, or at least (about) 93%, or at least (about) 94%, or at least (about) 95%, or at least (about) 96%, or at least (about) 97%, or at least (about) 98%, or at least (about) 99% identity to, or is identical to, paired VL and VH sequence(s) of the anti-TAG72 antibody/antibodies of Table 6. Some embodiments of the binding domain with binding affinity to the marker/antigen TAG72 can comprise the CDR-L1 region, the CDR-L2 region, the CDR-L3 region, the CDR-H1 region, the CDR-H2 region, and the CDR-H3 region, wherein each can be derived from the respective VL and VH sequence(s) set forth in Table 6. In some embodiments of the compositions of this disclosure, the binding domain specific for TAG72 can have a K_{d} value of greater than 10⁻⁷ to 10⁻¹⁰ M, as determined using an in vitro binding assay.

### Anti-TF-Antigen Binding Domains:

[0363] In some embodiments of the compositions of this disclosure, the binding domain can have specific binding affinity to the marker/antigen TF antigen. Some embodiments of the compositions of this disclosure can comprise a bispecific bioactive assembly comprising the binding domain specific for TF antigen and another binding domain (e.g., having specific binding affinity to an effector cell). The binding domain can comprise VL and VH derived from a monoclonal antibody to TF antigen. Monoclonal antibodies to TF antigen are known in the art. Some embodiments of the binding domain with binding affinity to the marker/antigen TF antigen can comprise anti-TF antigen VL and VH sequence(s). Some embodiments of the binding domain with binding affinity to the marker/antigen TF antigen can comprise VH and VL regions wherein each VH and VL regions can exhibit at least (about) 90%, or at least (about) 91%, or at least (about) 92%, or at least (about) 93%, or at least (about) 94%, or at least (about) 95%, or at least (about) 96%, or at least (about) 97%, or at least (about) 98%, or at least (about) 99% identity to, or is identical to, paired VL and VH sequence(s) of anti-TF antigen antibody/antibodies. Some embodiments of the binding domain with binding affinity to the marker/antigen TF antigen can comprise the CDR-L1 region, the CDR-L2 region, the CDR-L3 region, the CDR-H1 region, the CDR-H2 region, and the CDR-H3 region, wherein each can be derived from the respective VL and VH sequence(s). In some embodiments of the compositions of this disclosure, the binding domain specific for TF antigen can have a K_{d} value of greater than 10⁻⁷ to 10⁻¹⁰ M, as determined using an in vitro binding assay.

### Anti-IGF-IR Binding Domains:

[0364] In some embodiments of the compositions of this disclosure, the binding domain can have specific binding affinity to the marker/antigen IGF-IR. Some embodiments of the compositions of this disclosure can comprise a bispecific bioactive assembly comprising the binding domain specific for IGF-IR and another binding domain (e.g., having specific binding affinity to an effector cell). The binding domain can comprise VL and VH derived from a monoclonal antibody to IGF-IR. Monoclonal antibodies to IGF-IR are known in the art. Some embodiments of the binding domain with binding affinity to the marker/antigen IGF-IR can comprise anti-IGF-IR VL and VH sequence(s). Some embodiments of the binding domain with binding affinity to the marker/antigen IGF-IR can comprise VH and VL regions wherein each VH and VL regions can exhibit at least (about) 90%, or at least (about) 91%, or at least (about) 92%, or at least (about) 93%, or at least (about) 94%, or at least (about) 95%, or at least (about) 96%, or at least (about) 97%, or at least (about) 98%, or at least (about) 99% identity to, or is identical to, paired VL and VH sequence(s) of anti-IGF-IR antibody/antibodies. Some embodiments of the binding domain with binding affinity to the marker/antigen IGF-IR can comprise the CDR-L1 region, the CDR-L2 region, the CDR-L3 region, the CDR-H1 region, the CDR-H2 region, and the CDR-H3 region, wherein each can be derived from the respective VL and VH sequence(s). In some embodiments of the compositions of this disclosure, the binding domain specific for IGF-IR can have a K_{d} value of greater than 10⁻⁷ to 10⁻¹⁰ M, as determined using an in vitro binding assay.

### Anti-Cora Antigen Binding Domains:

[0365] In some embodiments of the compositions of this disclosure, the binding domain can have specific binding affinity to the marker/antigen cora antigen. Some embodiments of the compositions of this disclosure can comprise a bispecific bioactive assembly comprising the binding domain specific for cora antigen and another binding domain (e.g., having specific binding affinity to an effector cell). The binding domain can comprise VL and VH derived from a monoclonal antibody to cora antigen. Monoclonal antibodies to cora antigen are known in the art. Some embodiments of the binding domain with binding affinity to the marker/antigen cora antigen can comprise anti-cora antigen VL and VH sequence(s). Some embodiments of the binding domain with binding affinity to the marker/antigen cora antigen can comprise VH and VL regions wherein each VH and VL regions can exhibit at least (about) 90%, or at least (about) 91%, or at least (about) 92%, or at least (about) 93%, or at least (about) 94%, or at least (about) 95%, or at least (about) 96%, or at least (about) 97%, or at least (about) 98%, or at least (about) 99% identity to, or is identical to, paired VL and VH sequence(s) of anti-cora antigen antibody/antibodies. Some embodiments of the binding domain with binding affinity to the marker/antigen cora antigen can comprise the CDR-L1 region, the CDR-L2 region, the CDR-L3 region, the CDR-H1 region, the CDR-H2 region, and the CDR-H3 region, wherein each can be derived from the respective VL and VH sequence(s). In some embodiments of the compositions of this disclosure, the binding domain specific for cora antigen can have a K_{d} value of greater than 10⁻⁷ to 10⁻¹⁰ M, as determined using an in vitro binding assay.

### Anti-CD7 Binding Domains

[0366] In some embodiments of the compositions of this disclosure, the binding domain can have specific binding affinity to the marker/antigen CD7. Some embodiments of the compositions of this disclosure can comprise a bispecific bioactive assembly comprising the binding domain specific for CD7 and another binding domain (e.g., having specific binding affinity to an effector cell). The binding domain can comprise VL and VH derived from a monoclonal antibody to CD7. Monoclonal antibodies to CD7 are known in the art. Some embodiments of the binding domain with binding affinity to the marker/antigen CD7 can comprise anti-CD7 VL and VH sequence(s). Some embodiments of the binding domain with binding affinity to the marker/antigen CD7 can comprise VH and VL regions wherein each VH and VL regions can exhibit at least (about) 90%, or at least (about) 91%, or at least (about) 92%, or at least (about) 93%, or at least (about) 94%, or at least (about) 95%, or at least (about) 96%, or at least (about) 97%, or at least (about) 98%, or at least (about) 99% identity to, or is identical to, paired VL and VH sequence(s) of anti-CD7 antibody/antibodies. Some embodiments of the binding domain with binding affinity to the marker/antigen CD7 can comprise the CDR-L1 region, the CDR-L2 region, the CDR-L3 region, the CDR-H1 region, the CDR-H2 region, and the CDR-H3 region, wherein each can be derived from the respective VL and VH sequence(s). In some embodiments of the compositions of this disclosure, the binding domain specific for CD7 can have a K_{d} value of greater than 10⁻⁷ to 10⁻¹⁰ M, as determined using an in vitro binding assay.

### Anti-CD22 Binding Domains

[0367] In some embodiments of the compositions of this disclosure, the binding domain can have specific binding affinity to the marker/antigen CD22. Some embodiments of the compositions of this disclosure can comprise a bispecific bioactive assembly comprising the binding domain specific for CD22 and another binding domain (e.g., having specific binding affinity to an effector cell). The binding domain can comprise VL and VH derived from a monoclonal antibody to CD22. Monoclonal antibodies to CD22 are known in the art. Some embodiments of the binding domain with binding affinity to the marker/antigen CD22 can comprise anti-CD22 VL and VH sequence(s). Some embodiments of the binding domain with binding affinity to the marker/antigen CD22 can comprise VH and VL regions wherein each VH and VL regions can exhibit at least (about) 90%, or at least (about) 91%, or at least (about) 92%, or at least (about) 93%, or at least (about) 94%, or at least (about) 95%, or at least (about) 96%, or at least (about) 97%, or at least (about) 98%, or at least (about) 99% identity to, or is identical to, paired VL and VH sequence(s) of anti-CD22 antibody/antibodies. Some embodiments of the binding domain with binding affinity to the marker/antigen CD22 can comprise the CDR-L1 region, the CDR-L2 region, the CDR-L3 region, the CDR-H1 region, the CDR-H2 region, and the CDR-H3 region, wherein each can be derived from the respective VL and VH sequence(s). In some embodiments of the compositions of this disclosure, the binding domain specific for CD22 can have a K_{d} value of greater than 10⁻⁷ to 10⁻¹⁰ M, as determined using an in vitro binding assay.

### Anti-CD79a Binding Domains

[0368] In some embodiments of the compositions of this disclosure, the binding domain can have specific binding affinity to the marker/antigen CD79a. Some embodiments of the compositions of this disclosure can comprise a bispecific bioactive assembly comprising the binding domain specific for CD79a and another binding domain (e.g., having specific binding affinity to an effector cell). The binding domain can comprise VL and VH derived from a monoclonal antibody to CD79a. Monoclonal antibodies to CD79a are known in the art. Some embodiments of the binding domain with binding affinity to the marker/antigen CD79a can comprise anti-CD79a VL and VH sequence(s). Some embodiments of the binding domain with binding affinity to the marker/antigen CD79a can comprise VH and VL regions wherein each VH and VL regions can exhibit at least (about) 90%, or at least (about) 91%, or at least (about) 92%, or at least (about) 93%, or at least (about) 94%, or at least (about) 95%, or at least (about) 96%, or at least (about) 97%, or at least (about) 98%, or at least (about) 99% identity to, or is identical to, paired VL and VH sequence(s) of anti-CD79a antibody/antibodies. Some embodiments of the binding domain with binding affinity to the marker/antigen CD79a can comprise the CDR-L1 region, the CDR-L2 region, the CDR-L3 region, the CDR-H1 region, the CDR-H2 region, and the CDR-H3 region, wherein each can be derived from the respective VL and VH sequence(s). In some embodiments of the compositions of this disclosure, the binding domain specific for CD79a can have a K_{d} value of greater than 10⁻⁷ to 10⁻¹⁰ M, as determined using an in vitro binding assay.

### Anti-CD79b Binding Domains

[0369] In some embodiments of the compositions of this disclosure, the binding domain can have specific binding affinity to the marker/antigen CD79b. Some embodiments of the compositions of this disclosure can comprise a bispecific bioactive assembly comprising the binding domain specific for CD79b and another binding domain (e.g., having specific binding affinity to an effector cell). The binding domain can comprise VL and VH derived from a monoclonal antibody to CD79b. Monoclonal antibodies to CD79b are known in the art. Some embodiments of the binding domain with binding affinity to the marker/antigen CD79b can comprise anti-CD79b VL and VH sequence(s). Some embodiments of the binding domain with binding affinity to the marker/antigen CD79b can comprise VH and VL regions wherein each VH and VL regions can exhibit at least (about) 90%, or at least (about) 91%, or at least (about) 92%, or at least (about) 93%, or at least (about) 94%, or at least (about) 95%, or at least (about) 96%, or at least (about) 97%, or at least (about) 98%, or at least (about) 99% identity to, or is identical to, paired VL and VH sequence(s) of anti-CD79b antibody/antibodies. Some embodiments of the binding domain with binding affinity to the marker/antigen CD79b can comprise the CDR-L1 region, the CDR-L2 region, the CDR-L3 region, the CDR-H1 region, the CDR-H2 region, and the CDR-H3 region, wherein each can be derived from the respective VL and VH sequence(s). In some embodiments of the compositions of this disclosure, the binding domain specific for CD79b can have a K_{d} value of greater than 10⁻⁷ to 10⁻¹⁰ M, as determined using an in vitro binding assay.

### Anti-G250 Binding Domains

[0370] In some embodiments of the compositions of this disclosure, the binding domain can have specific binding affinity to the marker/antigen G250. Some embodiments of the compositions of this disclosure can comprise a bispecific bioactive assembly comprising the binding domain specific for G250 and another binding domain (e.g., having specific binding affinity to an effector cell). The binding domain can comprise VL and VH derived from a monoclonal antibody to G250. Monoclonal antibodies to G250 are known in the art. Some embodiments of the binding domain with binding affinity to the marker/antigen G250 can comprise anti-G250 VL and VH sequence(s). Some embodiments of the binding domain with binding affinity to the marker/antigen G250 can comprise VH and VL regions wherein each VH and VL regions can exhibit at least (about) 90%, or at least (about) 91%, or at least (about) 92%, or at least (about) 93%, or at least (about) 94%, or at least (about) 95%, or at least (about) 96%, or at least (about) 97%, or at least (about) 98%, or at least (about) 99% identity to, or is identical to, paired VL and VH sequence(s) of anti-G250 antibody/antibodies. Some embodiments of the binding domain with binding affinity to the marker/antigen G250 can comprise the CDR-L1 region, the CDR-L2 region, the CDR-L3 region, the CDR-H1 region, the CDR-H2 region, and the CDR-H3 region, wherein each can be derived from the respective VL and VH sequence(s). In some embodiments of the compositions of this disclosure, the binding domain specific for G250 can have a K_{d} value of greater than 10⁻⁷ to 10⁻¹⁰ M, as determined using an in vitro binding assay.

### Anti-MT-MMPs Binding Domains

[0371] In some embodiments of the compositions of this disclosure, the binding domain can have specific binding affinity to the marker/antigen MT-MMPs. Some embodiments of the compositions of this disclosure can comprise a bispecific bioactive assembly comprising the binding domain specific for MT-MMPs and another binding domain (e.g., having specific binding affinity to an effector cell). The binding domain can comprise VL and VH derived from a monoclonal antibody to MT-MMPs. Monoclonal antibodies to MT-MMPs are known in the art. Some embodiments of the binding domain with binding affinity to the marker/antigen MT-MMPs can comprise anti-MT-MMPs VL and VH sequence(s). Some embodiments of the binding domain with binding affinity to the marker/antigen MT-MMPs can comprise VH and VL regions wherein each VH and VL regions can exhibit at least (about) 90%, or at least (about) 91%, or at least (about) 92%, or at least (about) 93%, or at least (about) 94%, or at least (about) 95%, or at least (about) 96%, or at least (about) 97%, or at least (about) 98%, or at least (about) 99% identity to, or is identical to, paired VL and VH sequence(s) of anti-MT-MMPs antibody/antibodies. Some embodiments of the binding domain with binding affinity to the marker/antigen MT-MMPs can comprise the CDR-L1 region, the CDR-L2 region, the CDR-L3 region, the CDR-H1 region, the CDR-H2 region, and the CDR-H3 region, wherein each can be derived from the respective VL and VH sequence(s). In some embodiments of the compositions of this disclosure, the binding domain specific for MT-MMPs can have a K_{d} value of greater than 10⁻⁷ to 10⁻¹⁰ M, as determined using an in vitro binding assay.

### Anti-F19 Antigen Binding Domains

[0372] In some embodiments of the compositions of this disclosure, the binding domain can have specific binding affinity to the marker/antigen F19. Some embodiments of the compositions of this disclosure can comprise a bispecific bioactive assembly comprising the binding domain specific for F19 and another binding domain (e.g., having specific binding affinity to an effector cell). The binding domain can comprise VL and VH derived from a monoclonal antibody to F19. Monoclonal antibodies to F19 are known in the art. Some embodiments of the binding domain with binding affinity to the marker/antigen F19 can comprise anti-F19 VL and VH sequence(s). Some embodiments of the binding domain with binding affinity to the marker/antigen F19 can comprise VH and VL regions wherein each VH and VL regions can exhibit at least (about) 90%, or at least (about) 91%, or at least (about) 92%, or at least (about) 93%, or at least (about) 94%, or at least (about) 95%, or at least (about) 96%, or at least (about) 97%, or at least (about) 98%, or at least (about) 99% identity to, or is identical to, paired VL and VH sequence(s) of anti-F19 antibody/antibodies. Some embodiments of the binding domain with binding affinity to the marker/antigen F19 can comprise the CDR-L1 region, the CDR-L2 region, the CDR-L3 region, the CDR-H1 region, the CDR-H2 region, and the CDR-H3 region, wherein each can be derived from the respective VL and VH sequence(s). In some embodiments of the compositions of this disclosure, the binding domain specific for F19 can have a K_{d} value of greater than 10⁻⁷ to 10⁻¹⁰ M, as determined using an in vitro binding assay.

### Anti-EphA2 Receptor Binding Domains:

[0373] In some embodiments of the compositions of this disclosure, the binding domain can have specific binding affinity to the marker/antigen EphA2. Some embodiments of the compositions of this disclosure can comprise a bispecific bioactive assembly comprising the binding domain specific for EphA2 and another binding domain (e.g., having specific binding affinity to an effector cell). The binding domain can comprise VL and VH derived from a monoclonal antibody to EphA2. Monoclonal antibodies to EphA2 are known in the art. Exemplary, non-limiting example(s) of EphA2 monoclonal antibodies and the VL and VH sequences thereof are presented in Table 6. Some embodiments of the binding domain with binding affinity to the marker/antigen EphA2 can comprise anti-EphA2 VL and VH sequence(s) set forth in Table 6. Some embodiments of the binding domain with binding affinity to the marker/antigen EphA2 can comprise VH and VL regions wherein each VH and VL regions can exhibit at least (about) 90%, or at least (about) 91%, or at least (about) 92%, or at least (about) 93%, or at least (about) 94%, or at least (about) 95%, or at least (about) 96%, or at least (about) 97%, or at least (about) 98%, or at least (about) 99% identity to, or is identical to, paired VL and VH sequence(s) of the anti-EphA2 antibody/antibodies of Table 6. Some embodiments of the binding domain with binding affinity to the marker/antigen EphA2 can comprise the CDR-L1 region, the CDR-L2 region, the CDR-L3 region, the CDR-H1 region, the CDR-H2 region, and the CDR-H3 region, wherein each can be derived from the respective VL and VH sequence(s) set forth in Table 6. In some embodiments of the compositions of this disclosure, the binding domain specific for EphA2 can have a K_{d} value of greater than 10⁻⁷ to 10⁻¹⁰ M, as determined using an in vitro binding assay.

### Anti-Alpha 4 Integrin Binding Domains:

[0374] In some embodiments of the compositions of this disclosure, the binding domain can have specific binding affinity to the marker/antigen alpha 4 integrin. Some embodiments of the compositions of this disclosure can comprise a bispecific bioactive assembly comprising the binding domain specific for alpha 4 integrin and another binding domain (e.g., having specific binding affinity to an effector cell). The binding domain can comprise VL and VH derived from a monoclonal antibody to alpha 4 integrin. Monoclonal antibodies to alpha 4 integrin are known in the art. Exemplary, non-limiting example(s) of alpha 4 integrin monoclonal antibodies and the VL and VH sequences thereof are presented in Table 6. Some embodiments of the binding domain with binding affinity to the marker/antigen alpha 4 integrin can comprise anti-alpha 4 integrin VL and VH sequence(s) set forth in Table 6. Some embodiments of the binding domain with binding affinity to the marker/antigen alpha 4 integrin can comprise VH and VL regions wherein each VH and VL regions can exhibit at least (about) 90%, or at least (about) 91%, or at least (about) 92%, or at least (about) 93%, or at least (about) 94%, or at least (about) 95%, or at least (about) 96%, or at least (about) 97%, or at least (about) 98%, or at least (about) 99% identity to, or is identical to, paired VL and VH sequence(s) of the natalizumab antibody of Table 6. Some embodiments of the binding domain with binding affinity to the marker/antigen alpha 4 integrin can comprise the CDR-L1 region, the CDR-L2 region, the CDR-L3 region, the CDR-H1 region, the CDR-H2 region, and the CDR-H3 region, wherein each can be derived from the respective VL and VH sequence(s) set forth in Table 6. In some embodiments of the compositions of this disclosure, the binding domain specific for alpha 4 integrin can have a K_{d} value of greater than 10⁻⁷ to 10⁻¹⁰ M, as determined using an in vitro binding assay.

### Anti-Ang2 Binding Domains:

[0375] In some embodiments of the compositions of this disclosure, the binding domain can have specific binding affinity to the marker/antigen Ang2 (Angiopoietin-2). Some embodiments of the compositions of this disclosure can comprise a bispecific bioactive assembly comprising the binding domain specific for Ang2 and another binding domain (e.g., having specific binding affinity to an effector cell). The binding domain can comprise VL and VH derived from a monoclonal antibody to Ang2. Monoclonal antibodies to Ang2 are known in the art. Exemplary, non-limiting example(s) of Ang2 monoclonal antibodies and the VL and VH sequences thereof are presented in Table 6. Some embodiments of the binding domain with binding affinity to the marker/antigen Ang2 can comprise anti-Ang2 VL and VH sequence(s) set forth in Table 6. Some embodiments of the binding domain with binding affinity to the marker/antigen Ang2 can comprise VH and VL regions wherein each VH and VL regions can exhibit at least (about) 90%, or at least (about) 91%, or at least (about) 92%, or at least (about) 93%, or at least (about) 94%, or at least (about) 95%, or at least (about) 96%, or at least (about) 97%, or at least (about) 98%, or at least (about) 99% identity to, or is identical to, paired VL and VH sequence(s) of the nesvacumab antibody of Table 6. Some embodiments of the binding domain with binding affinity to the marker/antigen Ang2 can comprise the CDR-L1 region, the CDR-L2 region, the CDR-L3 region, the CDR-H1 region, the CDR-H2 region, and the CDR-H3 region, wherein each can be derived from the respective VL and VH sequence(s) set forth in Table 6. In some embodiments of the compositions of this disclosure, the binding domain specific for Ang2 can have a K_{d} value of greater than 10⁻⁷ to 10⁻¹⁰ M, as determined using an in vitro binding assay.

### Anti-CEACAM5 Binding Domains:

[0376] In some embodiments of the compositions of this disclosure, the binding domain can have specific binding affinity to the marker/antigen CEACAM5 (Carcinoembryonic Antigen-Related Cell Adhesion Molecule 5). Some embodiments of the compositions of this disclosure can comprise a bispecific bioactive assembly comprising the binding domain specific for CEACAM5 and another binding domain (e.g., having specific binding affinity to an effector cell). The binding domain can comprise VL and VH derived from a monoclonal antibody to CEACAM5. Monoclonal antibodies to CEACAM5 are known in the art. Exemplary, non-limiting example(s) of CEACAM5 monoclonal antibodies and the VL and VH sequences thereof are presented in Table 6. Some embodiments of the binding domain with binding affinity to the marker/antigen CEACAM5 can comprise anti-CEACAM5 VL and VH sequence(s) set forth in Table 6. Some embodiments of the binding domain with binding affinity to the marker/antigen CEACAM5 can comprise VH and VL regions wherein each VH and VL regions can exhibit at least (about) 90%, or at least (about) 91%, or at least (about) 92%, or at least (about) 93%, or at least (about) 94%, or at least (about) 95%, or at least (about) 96%, or at least (about) 97%, or at least (about) 98%, or at least (about) 99% identity to, or is identical to, paired VL and VH sequence(s) of the anti-CEACAM5 antibodies of Table 6. Some embodiments of the binding domain with binding affinity to the marker/antigen CEACAM5 can comprise the CDR-L1 region, the CDR-L2 region, the CDR-L3 region, the CDR-H1 region, the CDR-H2 region, and the CDR-H3 region, wherein each can be derived from the respective VL and VH sequence(s) set forth in Table 6. In some embodiments of the compositions of this disclosure, the binding domain specific for CEACAM5 can have a K_{d} value of greater than 10⁻⁷ to 10⁻¹⁰ M, as determined using an in vitro binding assay.

### Anti-CD38 Binding Domains:

[0377] In some embodiments of the compositions of this disclosure, the binding domain can have specific binding affinity to the marker/antigen CD38. Some embodiments of the compositions of this disclosure can comprise a bispecific bioactive assembly comprising the binding domain specific for CD38 and another binding domain (e.g., having specific binding affinity to an effector cell). The binding domain can comprise VL and VH derived from a monoclonal antibody to CD38. Monoclonal antibodies to CD38 are known in the art. Exemplary, non-limiting example(s) of CD38 monoclonal antibodies and the VL and VH sequences thereof are presented in Table 6. Some embodiments of the binding domain with binding affinity to the marker/antigen CD38 can comprise anti-CD38 VL and VH sequence(s) set forth in Table 6. Some embodiments of the binding domain with binding affinity to the marker/antigen CD38 can comprise VH and VL regions wherein each VH and VL regions can exhibit at least (about) 90%, or at least (about) 91%, or at least (about) 92%, or at least (about) 93%, or at least (about) 94%, or at least (about) 95%, or at least (about) 96%, or at least (about) 97%, or at least (about) 98%, or at least (about) 99% identity to, or is identical to, paired VL and VH sequence(s) of the anti-CD38 antibody/antibodies of Table 6. Some embodiments of the binding domain with binding affinity to the marker/antigen CD38 can comprise the CDR-L1 region, the CDR-L2 region, the CDR-L3 region, the CDR-H1 region, the CDR-H2 region, and the CDR-H3 region, wherein each can be derived from the respective VL and VH sequence(s) set forth in Table 6. In some embodiments of the compositions of this disclosure, the binding domain specific for CD38 can have a K_{d} value of greater than 10⁻⁷ to 10⁻¹⁰ M, as determined using an in vitro binding assay.

### Anti-CD70 Binding Domains:

[0378] In some embodiments of the compositions of this disclosure, the binding domain can have specific binding affinity to the marker/antigen CD70. Some embodiments of the compositions of this disclosure can comprise a bispecific bioactive assembly comprising the binding domain specific for CD70 and another binding domain (e.g., having specific binding affinity to an effector cell). The binding domain can comprise VL and VH derived from a monoclonal antibody to CD70. Monoclonal antibodies to CD70 are known in the art. Exemplary, non-limiting example(s) of CD70 monoclonal antibodies and the VL and VH sequences thereof are presented in Table 6. Some embodiments of the binding domain with binding affinity to the marker/antigen CD70 can comprise anti-CD70 VL and VH sequence(s) set forth in Table 6. Some embodiments of the binding domain with binding affinity to the marker/antigen CD70 can comprise VH and VL regions wherein each VH and VL regions can exhibit at least (about) 90%, or at least (about) 91%, or at least (about) 92%, or at least (about) 93%, or at least (about) 94%, or at least (about) 95%, or at least (about) 96%, or at least (about) 97%, or at least (about) 98%, or at least (about) 99% identity to, or is identical to, paired VL and VH sequence(s) of the anti-CD70 antibodies of Table 6. Some embodiments of the binding domain with binding affinity to the marker/antigen CD70 can comprise the CDR-L1 region, the CDR-L2 region, the CDR-L3 region, the CDR-H1 region, the CDR-H2 region, and the CDR-H3 region, wherein each can be derived from the respective VL and VH sequence(s) set forth in Table 6. In some embodiments of the compositions of this disclosure, the binding domain specific for CD70 can have a K_{d} value of greater than 10⁻⁷ to 10⁻¹⁰ M, as determined using an in vitro binding assay.

### Anti-cMET (Mesenchymal Epithelial Transition Factor) Binding Domains:

[0379] In some embodiments of the compositions of this disclosure, the binding domain can have specific binding affinity to the marker/antigen cMET. Some embodiments of the compositions of this disclosure can comprise a bispecific bioactive assembly comprising the binding domain specific for cMET and another binding domain (e.g., having specific binding affinity to an effector cell). The binding domain can comprise VL and VH derived from a monoclonal antibody to cMET. Monoclonal antibodies to cMET are known in the art. Exemplary, non-limiting example(s) of cMET monoclonal antibodies and the VL and VH sequences thereof are presented in Table 6. Some embodiments of the binding domain with binding affinity to the marker/antigen cMET can comprise anti-cMET VL and VH sequence(s) set forth in Table 6. Some embodiments of the binding domain with binding affinity to the marker/antigen cMET can comprise VH and VL regions wherein each VH and VL regions can exhibit at least (about) 90%, or at least (about) 91%, or at least (about) 92%, or at least (about) 93%, or at least (about) 94%, or at least (about) 95%, or at least (about) 96%, or at least (about) 97%, or at least (about) 98%, or at least (about) 99% identity to, or is identical to, paired VL and VH sequence(s) of the anti-cMET antibodies of Table 6. Some embodiments of the binding domain with binding affinity to the marker/antigen cMET can comprise the CDR-L1 region, the CDR-L2 region, the CDR-L3 region, the CDR-H1 region, the CDR-H2 region, and the CDR-H3 region, wherein each can be derived from the respective VL and VH sequence(s) set forth in Table 6. In some embodiments of the compositions of this disclosure, the binding domain specific for cMET can have a K_{d} value of greater than 10⁻⁷ to 10⁻¹⁰ M, as determined using an in vitro binding assay.

### Anti-CTLA4 Binding Domains:

[0380] In some embodiments of the compositions of this disclosure, the binding domain can have specific binding affinity to the marker/antigen CTLA4. Some embodiments of the compositions of this disclosure can comprise a bispecific bioactive assembly comprising the binding domain specific for CTLA4 and another binding domain (e.g., having specific binding affinity to an effector cell). The binding domain can comprise VL and VH derived from a monoclonal antibody to CTLA4. Monoclonal antibodies to CTLA4 are known in the art. Exemplary, non-limiting example(s) of CTLA4 monoclonal antibodies and the VL and VH sequences thereof are presented in Table 6. Some embodiments of the binding domain with binding affinity to the marker/antigen CTLA4 can comprise anti-CTLA4 VL and VH sequence(s) set forth in Table 6. Some embodiments of the binding domain with binding affinity to the marker/antigen CTLA4 can comprise VH and VL regions wherein each VH and VL regions can exhibit at least (about) 90%, or at least (about) 91%, or at least (about) 92%, or at least (about) 93%, or at least (about) 94%, or at least (about) 95%, or at least (about) 96%, or at least (about) 97%, or at least (about) 98%, or at least (about) 99% identity to, or is identical to, paired VL and VH sequence(s) of the anti-CTLA4 antibodies of Table 6. Some embodiments of the binding domain with binding affinity to the marker/antigen CTLA4 can comprise the CDR-L1 region, the CDR-L2 region, the CDR-L3 region, the CDR-H1 region, the CDR-H2 region, and the CDR-H3 region, wherein each can be derived from the respective VL and VH sequence(s) set forth in Table 6. In some embodiments of the compositions of this disclosure, the binding domain specific for CTLA4 can have a K_{d} value of greater than 10⁻⁷ to 10⁻¹⁰ M, as determined using an in vitro binding assay.

### Anti-ENPP3 Binding Domains:

[0381] In some embodiments of the compositions of this disclosure, the binding domain can have specific binding affinity to the marker/antigen ENPP3 (ectonucleotide pyrophosphatase/phosphodiesterase 3). Some embodiments of the compositions of this disclosure can comprise a bispecific bioactive assembly comprising the binding domain specific for ENPP3 and another binding domain (e.g., having specific binding affinity to an effector cell). The binding domain can comprise VL and VH derived from a monoclonal antibody to ENPP3. Monoclonal antibodies to ENPP3 are known in the art. Exemplary, non-limiting example(s) of ENPP3 monoclonal antibodies and the VL and VH sequences thereof are presented in Table 6. Some embodiments of the binding domain with binding affinity to the marker/antigen ENPP3 can comprise anti-ENPP3 VL and VH sequence(s) set forth in Table 6. Some embodiments of the binding domain with binding affinity to the marker/antigen ENPP3 can comprise VH and VL regions wherein each VH and VL regions can exhibit at least (about) 90%, or at least (about) 91%, or at least (about) 92%, or at least (about) 93%, or at least (about) 94%, or at least (about) 95%, or at least (about) 96%, or at least (about) 97%, or at least (about) 98%, or at least (about) 99% identity to, or is identical to, paired VL and VH sequence(s) of the H16-7.8 antibody of Table 6. Some embodiments of the binding domain with binding affinity to the marker/antigen ENPP3 can comprise the CDR-L1 region, the CDR-L2 region, the CDR-L3 region, the CDR-H1 region, the CDR-H2 region, and the CDR-H3 region, wherein each can be derived from the respective VL and VH sequence(s) set forth in Table 6. In some embodiments of the compositions of this disclosure, the binding domain specific for ENPP3 can have a K_{d} value of greater than 10⁻⁷ to 10⁻¹⁰ M, as determined using an in vitro binding assay.

### Anti-FOLR1 Binding Domains:

[0382] In some embodiments of the compositions of this disclosure, the binding domain can have specific binding affinity to the marker/antigen FOLR1. Some embodiments of the compositions of this disclosure can comprise a bispecific bioactive assembly comprising the binding domain specific for FOLR1 and another binding domain (e.g., having specific binding affinity to an effector cell). The binding domain can comprise VL and VH derived from a monoclonal antibody to FOLR1. Monoclonal antibodies to FOLR1 are known in the art. Exemplary, non-limiting example(s) of FOLR1 monoclonal antibodies and the VL and VH sequences thereof are presented in Table 6. Some embodiments of the binding domain with binding affinity to the marker/antigen FOLR1 can comprise anti-FOLR1 VL and VH sequence(s) set forth in Table 6. Some embodiments of the binding domain with binding affinity to the marker/antigen FOLR1 can comprise VH and VL regions wherein each VH and VL regions can exhibit at least (about) 90%, or at least (about) 91%, or at least (about) 92%, or at least (about) 93%, or at least (about) 94%, or at least (about) 95%, or at least (about) 96%, or at least (about) 97%, or at least (about) 98%, or at least (about) 99% identity to, or is identical to, paired VL and VH sequence(s) of the anti-FOLR1 antibody/antibodies of Table 6. Some embodiments of the binding domain with binding affinity to the marker/antigen FOLR1 can comprise the CDR-L1 region, the CDR-L2 region, the CDR-L3 region, the CDR-H1 region, the CDR-H2 region, and the CDR-H3 region, wherein each can be derived from the respective VL and VH sequence(s) set forth in Table 6. In some embodiments of the compositions of this disclosure, the binding domain specific for FOLR1 can have a K_{d} value of greater than 10⁻⁷ to 10⁻¹⁰ M, as determined using an in vitro binding assay.

### Anti-GPC3 Binding Domains:

[0383] In some embodiments of the compositions of this disclosure, the binding domain can have specific binding affinity to the marker/antigen GPC3 (glypican 3). Some embodiments of the compositions of this disclosure can comprise a bispecific bioactive assembly comprising the binding domain specific for GPC3 and another binding domain (e.g., having specific binding affinity to an effector cell). The binding domain can comprise VL and VH derived from a monoclonal antibody to GPC3. Monoclonal antibodies to GPC3 are known in the art. Exemplary, non-limiting example(s) of GPC3 monoclonal antibodies and the VL and VH sequences thereof are presented in Table 6. Some embodiments of the binding domain with binding affinity to the marker/antigen GPC3 can comprise anti-GPC3 VL and VH sequence(s) set forth in Table 6. Some embodiments of the binding domain with binding affinity to the marker/antigen GPC3 can comprise VH and VL regions wherein each VH and VL regions can exhibit at least (about) 90%, or at least (about) 91%, or at least (about) 92%, or at least (about) 93%, or at least (about) 94%, or at least (about) 95%, or at least (about) 96%, or at least (about) 97%, or at least (about) 98%, or at least (about) 99% identity to, or is identical to, paired VL and VH sequence(s) of the anti-GPC3 antibody/antibodies of Table 6. Some embodiments of the binding domain with binding affinity to the marker/antigen GPC3 can comprise the CDR-L1 region, the CDR-L2 region, the CDR-L3 region, the CDR-H1 region, the CDR-H2 region, and the CDR-H3 region, wherein each can be derived from the respective VL and VH sequence(s) set forth in Table 6. In some embodiments of the compositions of this disclosure, the binding domain specific for GPC3 can have a K_{d} value of greater than 10⁻⁷ to 10⁻¹⁰ M, as determined using an in vitro binding assay.

### Anti-PD-L1 Binding Domains:

[0384] In some embodiments of the compositions of this disclosure, the binding domain can have specific binding affinity to the marker/antigen PD-L1. Some embodiments of the compositions of this disclosure can comprise a bispecific bioactive assembly comprising the binding domain specific for PD-L1 and another binding domain (e.g., having specific binding affinity to an effector cell). The binding domain can comprise VL and VH derived from a monoclonal antibody to PD-L1. Monoclonal antibodies to PD-L1 are known in the art. Exemplary, non-limiting example(s) of PD-L1 monoclonal antibodies and the VL and VH sequences thereof are presented in Table 6. Some embodiments of the binding domain with binding affinity to the marker/antigen PD-L1 can comprise anti-PD-L1 VL and VH sequence(s) set forth in Table 6. Some embodiments of the binding domain with binding affinity to the marker/antigen PD-L1 can comprise VH and VL regions wherein each VH and VL regions can exhibit at least (about) 90%, or at least (about) 91%, or at least (about) 92%, or at least (about) 93%, or at least (about) 94%, or at least (about) 95%, or at least (about) 96%, or at least (about) 97%, or at least (about) 98%, or at least (about) 99% identity to, or is identical to, paired VL and VH sequence(s) of the anti-PD-L1 antibody/antibodies of Table 6. Some embodiments of the binding domain with binding affinity to the marker/antigen PD-L1 can comprise the CDR-L1 region, the CDR-L2 region, the CDR-L3 region, the CDR-H1 region, the CDR-H2 region, and the CDR-H3 region, wherein each can be derived from the respective VL and VH sequence(s) set forth in Table 6. In some embodiments of the compositions of this disclosure, the binding domain specific for PD-L1 can have a K_{d} value of greater than 10⁻⁷ to 10⁻¹⁰ M, as determined using an in vitro binding assay.

### Anti-ROR1 Binding Domains:

[0385] In some embodiments of the compositions of this disclosure, the binding domain can have specific binding affinity to the marker/antigen ROR1. Some embodiments of the compositions of this disclosure can comprise a bispecific bioactive assembly comprising the binding domain specific for ROR1 and another binding domain (e.g., having specific binding affinity to an effector cell). The binding domain can comprise VL and VH derived from a monoclonal antibody to ROR1. Monoclonal antibodies to ROR1 are known in the art. Exemplary, non-limiting example(s) of ROR1 monoclonal antibodies and the VL and VH sequences thereof are presented in Table 6. Some embodiments of the binding domain with binding affinity to the marker/antigen ROR1 can comprise anti-ROR1 VL and VH sequence(s) set forth in Table 6. Some embodiments of the binding domain with binding affinity to the marker/antigen ROR1 can comprise VH and VL regions wherein each VH and VL regions can exhibit at least (about) 90%, or at least (about) 91%, or at least (about) 92%, or at least (about) 93%, or at least (about) 94%, or at least (about) 95%, or at least (about) 96%, or at least (about) 97%, or at least (about) 98%, or at least (about) 99% identity to, or is identical to, paired VL and VH sequence(s) of the anti-ROR1 antibody/antibodies of Table 6. Some embodiments of the binding domain with binding affinity to the marker/antigen ROR1 can comprise the CDR-L1 region, the CDR-L2 region, the CDR-L3 region, the CDR-H1 region, the CDR-H2 region, and the CDR-H3 region, wherein each can be derived from the respective VL and VH sequence(s) set forth in Table 6. In some embodiments of the compositions of this disclosure, the binding domain specific for ROR1 can have a K_{d} value of greater than 10⁻⁷ to 10⁻¹⁰ M, as determined using an in vitro binding assay.

### Anti-TPBG/5T4 Binding Domains:

[0386] In some embodiments of the compositions of this disclosure, the binding domain can have specific binding affinity to the marker/antigen TPBG/5T4 (trophoblast glycoprotein). Some embodiments of the compositions of this disclosure can comprise a bispecific bioactive assembly comprising the binding domain specific for TPBG/5T4 and another binding domain (e.g., having specific binding affinity to an effector cell). The binding domain can comprise VL and VH derived from a monoclonal antibody to TPBG/5T4. Monoclonal antibodies to TPBG/5T4 are known in the art. Exemplary, non-limiting example(s) of TPBG/5T4 monoclonal antibodies and the VL and VH sequences thereof are presented in Table 6. Some embodiments of the binding domain with binding affinity to the marker/antigen TPBG/5T4 can comprise anti-TPBG/5T4 VL and VH sequence(s) set forth in Table 6. Some embodiments of the binding domain with binding affinity to the marker/antigen TPBG/5T4 can comprise VH and VL regions wherein each VH and VL regions can exhibit at least (about) 90%, or at least (about) 91%, or at least (about) 92%, or at least (about) 93%, or at least (about) 94%, or at least (about) 95%, or at least (about) 96%, or at least (about) 97%, or at least (about) 98%, or at least (about) 99% identity to, or is identical to, paired VL and VH sequence(s) of the anti-TPBG/5T4 antibody/antibodies of Table 6. Some embodiments of the binding domain with binding affinity to the marker/antigen TPBG/5T4 can comprise the CDR-L1 region, the CDR-L2 region, the CDR-L3 region, the CDR-H1 region, the CDR-H2 region, and the CDR-H3 region, wherein each can be derived from the respective VL and VH sequence(s) set forth in Table 6. In some embodiments of the compositions of this disclosure, the binding domain specific for TPBG/5T4 can have a K_{d} value of greater than 10⁻⁷ to 10⁻¹⁰ M, as determined using an in vitro binding assay.

### Anti-TROP-2 Binding Domains:

[0387] In some embodiments of the compositions of this disclosure, the binding domain can have specific binding affinity to the marker/antigen TROP-2. Some embodiments of the compositions of this disclosure can comprise a bispecific bioactive assembly comprising the binding domain specific for TROP-2 and another binding domain (e.g., having specific binding affinity to an effector cell). The binding domain can comprise VL and VH derived from a monoclonal antibody to TROP-2. Monoclonal antibodies to TROP-2 are known in the art. Exemplary, non-limiting example(s) of TROP-2 monoclonal antibodies and the VL and VH sequences thereof are presented in Table 6. Some embodiments of the binding domain with binding affinity to the marker/antigen TROP-2 can comprise anti-TROP-2 VL and VH sequence(s) set forth in Table 6. Some embodiments of the binding domain with binding affinity to the marker/antigen TROP-2 can comprise VH and VL regions wherein each VH and VL regions can exhibit at least (about) 90%, or at least (about) 91%, or at least (about) 92%, or at least (about) 93%, or at least (about) 94%, or at least (about) 95%, or at least (about) 96%, or at least (about) 97%, or at least (about) 98%, or at least (about) 99% identity to, or is identical to, paired VL and VH sequence(s) of the anti-TROP-2 antibody/antibodies of Table 6. Some embodiments of the binding domain with binding affinity to the marker/antigen TROP-2 can comprise the CDR-L1 region, the CDR-L2 region, the CDR-L3 region, the CDR-H1 region, the CDR-H2 region, and the CDR-H3 region, wherein each can be derived from the respective VL and VH sequence(s) set forth in Table 6. In some embodiments of the compositions of this disclosure, the binding domain specific for TROP-2 can have a K_{d} value of greater than 10⁻⁷ to 10⁻¹⁰ M, as determined using an in vitro binding assay.

### Anti-VEGFR1 Binding Domains:

[0388] In some embodiments of the compositions of this disclosure, the binding domain can have specific binding affinity to the marker/antigen VEGFR1. Some embodiments of the compositions of this disclosure can comprise a bispecific bioactive assembly comprising the binding domain specific for VEGFR1 and another binding domain (e.g., having specific binding affinity to an effector cell). The binding domain can comprise VL and VH derived from a monoclonal antibody to VEGFR1. Monoclonal antibodies to VEGFR1 are known in the art. Exemplary, non-limiting example(s) of VEGFR1 monoclonal antibodies and the VL and VH sequences thereof are presented in Table 6. Some embodiments of the binding domain with binding affinity to the marker/antigen VEGFR1 can comprise anti-VEGFR1 VL and VH sequence(s) set forth in Table 6. Some embodiments of the binding domain with binding affinity to the marker/antigen VEGFR1 can comprise VH and VL regions wherein each VH and VL regions can exhibit at least (about) 90%, or at least (about) 91%, or at least (about) 92%, or at least (about) 93%, or at least (about) 94%, or at least (about) 95%, or at least (about) 96%, or at least (about) 97%, or at least (about) 98%, or at least (about) 99% identity to, or is identical to, paired VL and VH sequence(s) of the anti-VEGFR1 antibody/antibodies of Table 6. Some embodiments of the binding domain with binding affinity to the marker/antigen VEGFR1 can comprise the CDR-L1 region, the CDR-L2 region, the CDR-L3 region, the CDR-H1 region, the CDR-H2 region, and the CDR-H3 region, wherein each can be derived from the respective VL and VH sequence(s) set forth in Table 6. In some embodiments of the compositions of this disclosure, the binding domain specific for VEGFR1 can have a K_{d} value of greater than 10⁻⁷ to 10⁻¹⁰ M, as determined using an in vitro binding assay.

### Anti-VEGFR2 Binding Domains:

[0389] In some embodiments of the compositions of this disclosure, the binding domain can have specific binding affinity to the marker/antigen VEGFR2 (vascular endothelial growth factor receptor 2). Some embodiments of the compositions of this disclosure can comprise a bispecific bioactive assembly comprising the binding domain specific for VEGFR2 and another binding domain (e.g., having specific binding affinity to an effector cell). The binding domain can comprise VL and VH derived from a monoclonal antibody to VEGFR2. Monoclonal antibodies to VEGFR2 are known in the art. Exemplary, non-limiting example(s) of VEGFR2 monoclonal antibodies and the VL and VH sequences thereof are presented in Table 6. Some embodiments of the binding domain with binding affinity to the marker/antigen VEGFR2 can comprise anti-VEGFR2 VL and VH sequence(s) set forth in Table 6. Some embodiments of the binding domain with binding affinity to the marker/antigen VEGFR2 can comprise VH and VL regions wherein each VH and VL regions can exhibit at least (about) 90%, or at least (about) 91%, or at least (about) 92%, or at least (about) 93%, or at least (about) 94%, or at least (about) 95%, or at least (about) 96%, or at least (about) 97%, or at least (about) 98%, or at least (about) 99% identity to, or is identical to, paired VL and VH sequence(s) of the anti-VEGFR2 antibodies of Table 6. Some embodiments of the binding domain with binding affinity to the marker/antigen VEGFR2 can comprise the CDR-L1 region, the CDR-L2 region, the CDR-L3 region, the CDR-H1 region, the CDR-H2 region, and the CDR-H3 region, wherein each can be derived from the respective VL and VH sequence(s) set forth in Table 6. In some embodiments of the compositions of this disclosure, the binding domain specific for VEGFR2 can have a K_{d} value of greater than 10⁻⁷ to 10⁻¹⁰ M, as determined using an in vitro binding assay.

[0390] It is specifically contemplated that the compositions of this disclosure can comprise any one of the foregoing binding domains or sequence variants thereof so long as the variants exhibit binding specificity for the described antigen. A sequence variant can be created by substitution of an amino acid in the VL or VH sequence with a different amino acid. In deletion variants, one or more amino acid residues in a VL or VH sequence as described herein are removed. Deletion variants, therefore, include all fragments of a binding domain polypeptide sequence. In substitution variants, one or more amino acid residues of a VL or VH (or CDR) polypeptide are removed and replaced with alternative residues. The substitutions can be conservative in nature and conservative substitutions of this type are well known in the art. In addition, it is specifically contemplated that the compositions comprising the first and the second binding domains disclosed herein can be utilized in any of the methods disclosed herein.

### Exemplary Activatable Therapeutic Agents

[0391] In some embodiments of the compositions of this disclosure, the activatable therapeutic agent is a recombinant polypeptide comprising an amino acid sequence having at least (about) 80% sequence identity to a sequence set forth in Table 7, or a subset thereof. The activatable therapeutic agent can comprise an amino acid sequence having at least (about) 81%, at least (about) 82%, at least (about) 83%, at least (about) 84%, at least (about) 85%, at least (about) 86%, at least (about) 87%, at least (about) 88%, at least (about) 89%, at least (about) 90%, at least (about) 91%, at least (about) 92%, at least (about) 93%, at least (about) 94%, at least (about) 95%, at least (about) 96%, at least (about) 97%, at least (about) 98%, or at least (about) 99% sequence identity to a sequence set forth in Table 7, or a subset thereof. The activatable therapeutic agent can comprise an amino acid sequence identical to a sequence set forth in Table 7, or a subset thereof. It is specifically contemplated that the compositions of this disclosure can comprise sequence variants of the amino acid sequences set forth in Table 7, or a subset thereof, such as with linker sequence(s) inserted or with purification tag sequence(s) attached thereto, so long as the variants exhibit substantially similar or same bioactivity/bioactivities and/or activation mechanism(s).

TABLE 7
Amino acid sequences of exemplary recombinant polypeptides

| SEQ ID | |
|---|---|
| NOS. | Amino Acid Sequence |
| 9 | ASHHHHHHSPAGSPTSTEEGTSESATPESGPGTSTEPSEGSAPGTSESATPESGPGS |
| | EPATSGSETPGTSESATPESGPGSEPATSGSETPGTSESATPESGPGTSTEPSEGSAP |
| | GSPAGSPTSTEEGTSESATPESGPGSEPATSGSETPGTSESATPESGPGSPAGSPTST |
| | EEGSPAGSPTSTEEGTSTEPSEGSAPGTSESATPESGPGTSESATPESGPGTSESATP |
| | ESGPGSEPATSGSETPGSEPATSGSETPGSPAGSPTSTEEGTSTEPSEGSAPGTSTEP |
| | SEGSAPGGSAPGPSGHMGRATSGSETPGTDIQMTQSPSSLSASVGDRVTITCKASQ |
| | DVSIGVAWYQQKPGKAPKLLIYSASYRYTGVPSRFSGSGSGTDFTLTISSLQPEDF |
| | ATYYCQQYYTYPYTFGQGTKVEIKGATPPETGAETESPGETTGGSAESEPPGEGE |
| | VQLVESGGGLVQPGGSLRLSCAASGFTFTDYTMDWVRQAPGKGLEWVADVNPN |
| | SGGSIYNQRFKGRFTLSVDRSKNTLYLQMNSLRAEDTAVYYCARNLGPSFYFDY |
| | WGQGTLVTVSSGGGGSELVVTQEPSLTVSPGGTVTLTCRSSNGAVTSSNYANWV |
| | QQKPGQAPRGLIGGTNKRAPGTPARFSGSLLGGKAALTLSGVQPEDEAVYYCAL |
| | WYPNLWVFGGGTKLTVLGATPPETGAETESPGETTGGSAESEPPGEGEVQLLES |
| | GGGIVQPGGSLKLSCAASGFTFNTYAMNWVRQAPGKGLEWVARIRSKYNNYAT |
| | YYADSVKDRFTISRDDSKNTVYLQMNNLKTEDTAVYYCVRHENFGNSYVSWFAH |
| | WGQGTLVTVSSGTAEAASASGGPSGHMGRPGSPAGSPTSTEEGTSESATPESGPG |
| | TSTEPSEGSAPGSPAGSPTSTEEGTSTEPSEGSAPGTSTEPSEGSAPGTSESATPESG |
| | PGSEPATSGSETPGSEPATSGSETPGSPAGSPTSTEEGTSESATPESGPGTSTEPSEG |
| | SAPGTSTEPSEGSAPGSPAGSPTSTEEGTSTEPSEGSAPGTSTEPSEGSAPGTSESAT |
| | PESGPGTSTEPSEGSAPGTSESATPESGPGSEPATSGSETPGTSTEPSEGSAPGTSTE |
| | PSEGSAPGTSESATPESGPGTSESATPESGPGSPAGSPTSTEEGTSESATPESGPGSE |
| | PATSGSETPGTSESATPESGPGTSTEPSEGSAPGTSTEPSEGSAPGTSTEPSEGSAPG |
| | TSTEPSEGSAPGTSTEPSEGSAPGTSTEPSEGSAPGSPAGSPTSTEEGTSTEPSEGSA |
| | PGTSESATPESGPGSEPATSGSETPGTSESATPESGPGSEPATSGSETPGTSESATPE |
| | SGPGTSTEPSEGSAPGTSESATPESGPGSPAGSPTSTEEGSPAGSPTSTEEGSPAGSP |
| | TSTEEGTSESATPESGPGTSTEPSEGSAPGAAEPEA |
| 10 | ASHHHHHHSPAGSPTSTEEGTSESATPESGPGTSTEPSEGSAPGTSESATPESGPGS |
| | EPATSGSETPGTSESATPESGPGSEPATSGSETPGTSESATPESGPGTSTEPSEGSAP |
| | GSPAGSPTSTEEGTSESATPESGPGSEPATSGSETPGTSESATPESGPGSPAGSPTST |
| | EEGSPAGSPTSTEEGTSTEPSEGSAPGTSESATPESGPGTSESATPESGPGTSESATP |
| | ESGPGSEPATSGSETPGSEPATSGSETPGSPAGSPTSTEEGTSTEPSEGSAPGTSTEP |
| | SEGSAPGGSAPHPVELLARATSGSETPGTDIQMTQSPSSLSASVGDRVTITCQASQ |
| | DISNYLNWYQQKPGKAPKLLIYDASNLETGVPSRFSGSGSGTDFTFTISSLQPEDIA |
| | TYFCQHFDHLPLAFGGGTKVEIKGATPPETGAETESPGETTGGSAESEPPGEGQV |
| | QLQESGPGLVKPSETLSLTCTVSGGSVSSGDYYWTWIRQSPGKGLEWIGHIYYSG |
| | NTNYNPSLKSRLTISIDTSKTQFSLKLSSVTAADTAIYYCVRDRVTGAFDIWGQGT |
| | MVTVSSGGGGSELVVTQEPSLTVSPGGTVTLTCRSSTGAVTTSNYANWVQQKPG |
| | QAPRGLIGGTNKRAPGTPARFSGSLLGGKAALTLSGVQPEDEAEYYCALWYSNL |
| | WVFGGGTKLTVLGATPPETGAETESPGETTGGSAESEPPGEGEVQLLESGGGLV |
| | QPGGSLKLSCAASGFTFNTYAMNWVRQAPGKGLEWVARIRSKYNNYATYYADS |
| | VKDRFTISRDDSKNTAYLQMNNLKTEDTAVYYCVRHGNFGNSYVSWFAYWGQG |
| | TLVTVSSGTAEAASASGHPVELLARPGSPAGSPTSTEEGTSESATPESGPGTSTEPS |
| | EGSAPGSPAGSPTSTEEGTSTEPSEGSAPGTSTEPSEGSAPGTSESATPESGPGSEPA |
| | TSGSETPGSEPATSGSETPGSPAGSPTSTEEGTSESATPESGPGTSTEPSEGSAPGTS |
| | TEPSEGSAPGSPAGSPTSTEEGTSTEPSEGSAPGTSTEPSEGSAPGTSESATPESGPG |
| | TSTEPSEGSAPGTSESATPESGPGSEPATSGSETPGTSTEPSEGSAPGTSTEPSEGSA |
| | PGTSESATPESGPGTSESATPESGPGSPAGSPTSTEEGTSESATPESGPGSEPATSGS |
| | ETPGTSESATPESGPGTSTEPSEGSAPGTSTEPSEGSAPGTSTEPSEGSAPGTSTEPS |
| | EGSAPGTSTEPSEGSAPGTSTEPSEGSAPGSPAGSPTSTEEGTSTEPSEGSAPGTSES |
| | ATPESGPGSEPATSGSETPGTSESATPESGPGSEPATSGSETPGTSESATPESGPGTS |
| | TEPSEGSAPGTSESATPESGPGSPAGSPTSTEEGSPAGSPTSTEEGSPAGSPTSTEEG |
| | TSESATPESGPGTSTEPSEGSAPGAAEPEA |
| 11 | ASHHHHHHSPAGSPTSTEEGTSESATPESGPGTSTEPSEGSAPGTSESATPESGPGS |
| | EPATSGSETPGTSESATPESGPGSEPATSGSETPGTSESATPESGPGTSTEPSEGSAP |
| | GSPAGSPTSTEEGTSESATPESGPGSEPATSGSETPGTSESATPESGPGSPAGSPTST |
| | EEGSPAGSPTSTEEGTSTEPSEGSAPGTSESATPESGPGTSESATPESGPGTSESATP |
| | ESGPGSEPATSGSETPGSEPATSGSETPGSPAGSPTSTEEGTSTEPSEGSAPGTSTEP |
| | SEGSAPGGSAPVSKRFPVGATSGSETPGTDIQMTQSPSSLSASVGDRVTITCQASQ |
| | DISNYLNWYQQKPGKAPKLLIYDASNLETGVPSRFSGSGSGTDFTFTISSLQPEDIA |
| | TYFCQHFDHLPLAFGGGTKVEIKGATPPETGAETESPGETTGGSAESEPPGEGQV |
| | QLQESGPGLVKPSETLSLTCTVSGGSVSSGDYYWTWIRQSPGKGLEWIGHIYYSG |
| | NTNYNPSLKSRLTISIDTSKTQFSLKLSSVTAADTAIYYCVRDRVTGAFDIWGQGT |
| | MVTVSSGGGGSELVVTQEPSLTVSPGGTVTLTCRSSTGAVTTSNYANWVQQKPG |
| | QAPRGLIGGTNKRAPGTPARFSGSLLGGKAALTLSGVQPEDEAEYYCALWYSNL |
| | WVFGGGTKLTVLGATPPETGAETESPGETTGGSAESEPPGEGEVQLLESGGGLV |
| | QPGGSLKLSCAASGFTFNTYAMNWVRQAPGKGLEWVARIRSKYNNYATYYADS |
| | VKDRFTISRDDSKNTAYLQMNNLKTEDTAVYYCVRHGNFGNSYVSWFAYWGQG |
| | TLVTVSSGTAEAASASGVSKRFPVGPGSPAGSPTSTEEGTSESATPESGPGTSTEPS |
| | EGSAPGSPAGSPTSTEEGTSTEPSEGSAPGTSTEPSEGSAPGTSESATPESGPGSEPA |
| | TSGSETPGSEPATSGSETPGSPAGSPTSTEEGTSESATPESGPGTSTEPSEGSAPGTS |
| | TEPSEGSAPGSPAGSPTSTEEGTSTEPSEGSAPGTSTEPSEGSAPGTSESATPESGPG |
| | TSTEPSEGSAPGTSESATPESGPGSEPATSGSETPGTSTEPSEGSAPGTSTEPSEGSA |
| | PGTSESATPESGPGTSESATPESGPGSPAGSPTSTEEGTSESATPESGPGSEPATSGS |
| | ETPGTSESATPESGPGTSTEPSEGSAPGTSTEPSEGSAPGTSTEPSEGSAPGTSTEPS |
| | EGSAPGTSTEPSEGSAPGTSTEPSEGSAPGSPAGSPTSTEEGTSTEPSEGSAPGTSES |
| | ATPESGPGSEPATSGSETPGTSESATPESGPGSEPATSGSETPGTSESATPESGPGTS |
| | TEPSEGSAPGTSESATPESGPGSPAGSPTSTEEGSPAGSPTSTEEGSPAGSPTSTEEG |
| | TSESATPESGPGTSTEPSEGSAPGAAEPEA |
| 12 | ASSPAGSPTSTESGTSESATPESGPGTETEPSEGSAPGTSESATPESGPGSEPATSGS |
| | ETPGTSESATPESGPGSTPAESGSETPGTSESATPESGPGTSTEPSEGSAPGSPAGSP |
| | TSTEEGTSESATPESGPGESPATSGSTPEGTSESATPESGPGSPAGSPTSTEEGSPAG |
| | SPTSTEEGTSTEPSEGSAPGTSESATPESGPGTSESATPESGPGTSESATPESGPGSE |
| | PATSGSETPGSEPATSGSETPGSPAGSPTSTEEGTSTEPSEGSAPGTSTEPSEGSAPG |
| | GSAPEAGRSANHTPAGLTGPATSGSETPGTEIVLTQSPATLSLSPGERATLSCKAS |
| | QDVSIGVAWYQQKPGQAPRLLIYSASYRYSGVPARFSGSGSGTDFTLTISSLEPED |
| | FAVYYCQQYYIYPYTFGQGTKVEIKGATPPETGAETESPGETTGGSAESEPPGEG |
| | QVQLVQSGVEVKKPGASVKVSCKASGFTFTDYTMDWVRQAPGQGLEWMADVN |
| | PNSGGSIYNQRFKGRVTLTTDSSTTTAYMELKSLQFDDTAVYYCARNLGPSFYFD |
| | YWGQGTLVTVSSGGGSELVVTQEPSLTVSPGGTVTLTCRSSNGAVTSSNYANWV |
| | QQKPGQAPRGLIGGTNKRAPGTPARFSGSSLGGKAALTLSGVQPEDEAVYYCAL |
| | WYPNLWVFGGGTKLTVLGATPPETGAETESPGETTGGSAESEPPGEGEVQLQES |
| | GGGIVQPGGSLKLSCAASGFTFNTYAMNWVRQAPGKGLEWVARIRSKYNNYAT |
| | YYADSVKDRFTISRDDSKNTVYLQMNNLKTEDTAVYYCVRHENFGNSYVSWFAH |
| | WGQGTLVTVSSGTAEAASASGEAGRSANHTPAGLTGPTPESGPGTSESATPESGP |
| | GSPAGSPTSTEEGTSESATPESGPGSEPATSGSETPGTSESATPESGPGTSTEPSEGS |
| | APGTSTEPSEGSAPGTSTEPSEGSAPGTSTEPSEGSAPGTSTEPSEGSAPGTSTEPSE |
| | GSAPGSPAGSPTSTEEGTSTEPSEGSAPGTSESATPESGPGSEPATSGSETPGTSESA |
| | TPESGPGSEPATSGSETPGTSESATPESGPGTSTEPSEGSAPGTSESATPESGPGSPA |
| | GSPTSTEEGSPAGSPTSTEEGSPAGSPTSTEEGTSESATPESGPGTSTEPSEGSAPGT |
| | SESATPESGPGSEPATSGSETPGTSESATPESGPGSEPATSGSETPGTSESATPESGP |
| | GTSTEPSEGSAPGSPAGSPTSTEEGTSESATPESGPGSEPATSGSETPGTSESATPES |
| | GPGSPAGSPTSTEEGSPAGSPTSTEEGTSTEPSEGSAPGTSESATPESGPGTSESATP |
| | ESGPGTSESATPESGPGSEPATSGSETPGSESATSGSETPGSPAGSPTSTEEGTSTEP |
| | SEGSAPGTSTEPSEGSAPGSEPATSGSETPGTSESA |
| 13 | ASHHHHHHSPAGSPTSTEEGTSESATPESGPGTSTEPSEGSAPGTSESATPESGPGS |
| | EPATSGSETPGTSESATPESGPGSEPATSGSETPGTSESATPESGPGTSTEPSEGSAP |
| | GSPAGSPTSTEEGTSESATPESGPGSEPATSGSETPGTSESATPESGPGSPAGSPTST |
| | EEGSPAGSPTSTEEGTSTEPSEGSAPGTSESATPESGPGTSESATPESGPGTSESATP |
| | ESGPGSEPATSGSETPGSEPATSGSETPGSPAGSPTSTEEGTSTEPSEGSAPGTSTEP |
| | SEGSAPGGSAPSPEAQAAAATSGSETPGTDIQMTQSPSSLSASVGDRVTITCQASQ |
| | DISNYLNWYQQKPGKAPKLLIYDASNLETGVPSRFSGSGSGTDFTFTISSLQPEDIA |
| | TYFCQHFDHLPLAFGGGTKVEIKGATPPETGAETESPGETTGGSAESEPPGEGQV |
| | QLQESGPGLVKPSETLSLTCTVSGGSVSSGDYYWTWIRQSPGKGLEWIGHIYYSG |
| | NTNYNPSLKSRLTISIDTSKTQFSLKLSSVTAADTAIYYCVRDRVTGAFDIWGQGT |
| | MVTVSSGGGGSELVVTQEPSLTVSPGGTVTLTCRSSTGAVTTSNYANWVQQKPG |
| | QAPRGLIGGTNKRAPGTPARFSGSLLGGKAALTLSGVQPEDEAEYYCALWYSNL |
| | WVFGGGTKLTVLGATPPETGAETESPGETTGGSAESEPPGEGEVQLLESGGGLV |
| | QPGGSLKLSCAASGFTFNTYAMNWVRQAPGKGLEWVARIRSKYNNYATYYADS |
| | VKDRFTISRDDSKNTAYLQMNNLKTEDTAVYYCVRHGNFGNSYVSWFAYWGQG |
| | TLVTVSSGTAEAASASGSPEAQAAAPGSPAGSPTSTEEGTSESATPESGPGTSTEPS |
| | EGSAPGSPAGSPTSTEEGTSTEPSEGSAPGTSTEPSEGSAPGTSESATPESGPGSEPA |
| | TSGSETPGSEPATSGSETPGSPAGSPTSTEEGTSESATPESGPGTSTEPSEGSAPGTS |
| | TEPSEGSAPGSPAGSPTSTEEGTSTEPSEGSAPGTSTEPSEGSAPGTSESATPESGPG |
| | TSTEPSEGSAPGTSESATPESGPGSEPATSGSETPGTSTEPSEGSAPGTSTEPSEGSA |
| | PGTSESATPESGPGTSESATPESGPGSPAGSPTSTEEGTSESATPESGPGSEPATSGS |
| | ETPGTSESATPESGPGTSTEPSEGSAPGTSTEPSEGSAPGTSTEPSEGSAPGTSTEPS |
| | EGSAPGTSTEPSEGSAPGTSTEPSEGSAPGSPAGSPTSTEEGTSTEPSEGSAPGTSES |
| | ATPESGPGSEPATSGSETPGTSESATPESGPGSEPATSGSETPGTSESATPESGPGTS |
| | TEPSEGSAPGTSESATPESGPGSPAGSPTSTEEGSPAGSPTSTEEGSPAGSPTSTEEG |
| | TSESATPESGPGTSTEPSEGSAPGAAEPEA |
| 14 | ASHHHHHHSPAGSPTSTEEGTSESATPESGPGTSTEPSEGSAPGTSESATPESGPGS |
| | EPATSGSETPGTSESATPESGPGSEPATSGSETPGTSESATPESGPGTSTEPSEGSAP |
| | GSPAGSPTSTEEGTSESATPESGPGSEPATSGSETPGTSESATPESGPGSPAGSPTST |
| | EEGSPAGSPTSTEEGTSTEPSEGSAPGTSESATPESGPGTSESATPESGPGTSESATP |
| | ESGPGSEPATSGSETPGSEPATSGSETPGSPAGSPTSTEEGTSTEPSEGSAPGTSTEP |
| | SEGSAPGGSAPEAGRSANHGVRGLTGPATSGSETPGTDIQMTQSPSSLSASVGDRV |
| | TITCKASQDVSIGVAWYQQKPGKAPKLLIYSASYRYTGVPSRFSGSGSGTDFTLTI |
| | SSLQPEDFATYYCQQYYTYPYTFGQGTKVEIKGATPPETGAETESPGETTGGSAES |
| | EPPGEGEVQLVESGGGLVQPGGSLRLSCAASGFTFTDYTMDWVRQAPGKGLEW |
| | VADVNPNSGGSIYNQRFKGRFTLSVDRSKNTLYLQMNSLRAEDTAVYYCARNLG |
| | PSFYFDYWGQGTLVTVSSGGGGSELVVTQEPSLTVSPGGTVTLTCRSSNGAVTSS |
| | NYANWVQQKPGQAPRGLIGGTNKRAPGTPARFSGSLLGGKAALTLSGVQPEDEA |
| | VYYCALWYPNLWVFGGGTKLTVLGATPPETGAETESPGETTGGSAESEPPGEGE |
| | VQLLESGGGIVQPGGSLKLSCAASGFTFNTYAMNWVRQAPGKGLEWVARIRSKY |
| | NNYATYYADSVKDRFTISRDDSKNTVYLQMNNLKTEDTAVYYCVRHENFGNSYV |
| | SWFAHWGQGTLVTVSSGTAEAASASGEAGRSANHGVRGLTGPPGSPAGSPTSTE |
| | EGTSESATPESGPGTSTEPSEGSAPGSPAGSPTSTEEGTSTEPSEGSAPGTSTEPSEG |
| | SAPGTSESATPESGPGSEPATSGSETPGSEPATSGSETPGSPAGSPTSTEEGTSESAT |
| | PESGPGTSTEPSEGSAPGTSTEPSEGSAPGSPAGSPTSTEEGTSTEPSEGSAPGTSTE |
| | PSEGSAPGTSESATPESGPGTSTEPSEGSAPGTSESATPESGPGSEPATSGSETPGTS |
| | TEPSEGSAPGTSTEPSEGSAPGTSESATPESGPGTSESATPESGPGSPAGSPTSTEEG |
| | TSESATPESGPGSEPATSGSETPGTSESATPESGPGTSTEPSEGSAPGTSTEPSEGSA |
| | PGTSTEPSEGSAPGTSTEPSEGSAPGTSTEPSEGSAPGTSTEPSEGSAPGSPAGSPTS |
| | TEEGTSTEPSEGSAPGTSESATPESGPGSEPATSGSETPGTSESATPESGPGSEPATS |
| | GSETPGTSESATPESGPGTSTEPSEGSAPGTSESATPESGPGSPAGSPTSTEEGSPAG |
| | SPTSTEEGSPAGSPTSTEEGTSESATPESGPGTSTEPSEGSAPGAAEPEA |
| 15 | ASHHHHHHSPAGSPTSTEEGTSESATPESGPGTSTEPSEGSAPGTSESATPESGPGS |
| | EPATSGSETPGTSESATPESGPGSEPATSGSETPGTSESATPESGPGTSTEPSEGSAP |
| | GSPAGSPTSTEEGTSESATPESGPGSEPATSGSETPGTSESATPESGPGSPAGSPTST |
| | EEGSPAGSPTSTEEGTSTEPSEGSAPGTSESATPESGPGTSESATPESGPGTSESATP |
| | ESGPGSEPATSGSETPGSEPATSGSETPGSPAGSPTSTEEGTSTEPSEGSAPGTSTEP |
| | SEGSAPGGSAPLTSDLQAQATSGSETPGTDIQMTQSPSSLSASVGDRVTITCKASQ |
| | DVSIGVAWYQQKPGKAPKLLIYSASYRYTGVPSRFSGSGSGTDFTLTISSLQPEDF |
| | ATYYCQQYYTYPYTFGQGTKVEIKGATPPETGAETESPGETTGGSAESEPPGEGE |
| | VQLVESGGGLVQPGGSLRLSCAASGFTFTDYTMDWVRQAPGKGLEWVADVNPN |
| | SGGSIYNQRFKGRFTLSVDRSKNTLYLQMNSLRAEDTAVYYCARNLGPSFYFDY |
| | WGQGTLVTVSSGGGGSELVVTQEPSLTVSPGGTVTLTCRSSNGAVTSSNYANWV |
| | QQKPGQAPRGLIGGTNKRAPGTPARFSGSLLGGKAALTLSGVQPEDEAVYYCAL |
| | WYPNLWVFGGGTKLTVLGATPPETGAETESPGETTGGSAESEPPGEGEVQLLES |
| | GGGIVQPGGSLKLSCAASGFTFNTYAMNWVRQAPGKGLEWVARIRSKYNNYAT |
| | YYADSVKDRFTISRDDSKNTVYLQMNNLKTEDTAVYYCVRHENFGNSYVSWFAH |
| | WGQGTLVTVSSGTAEAASASGLTSDLQAQPGSPAGSPTSTEEGTSESATPESGPGT |
| | STEPSEGSAPGSPAGSPTSTEEGTSTEPSEGSAPGTSTEPSEGSAPGTSESATPESGP |
| | GSEPATSGSETPGSEPATSGSETPGSPAGSPTSTEEGTSESATPESGPGTSTEPSEGS |
| | APGTSTEPSEGSAPGSPAGSPTSTEEGTSTEPSEGSAPGTSTEPSEGSAPGTSESATP |
| | ESGPGTSTEPSEGSAPGTSESATPESGPGSEPATSGSETPGTSTEPSEGSAPGTSTEP |
| | SEGSAPGTSESATPESGPGTSESATPESGPGSPAGSPTSTEEGTSESATPESGPGSEP |
| | ATSGSETPGTSESATPESGPGTSTEPSEGSAPGTSTEPSEGSAPGTSTEPSEGSAPGT |
| | STEPSEGSAPGTSTEPSEGSAPGTSTEPSEGSAPGSPAGSPTSTEEGTSTEPSEGSAP |
| | GTSESATPESGPGSEPATSGSETPGTSESATPESGPGSEPATSGSETPGTSESATPES |
| | GPGTSTEPSEGSAPGTSESATPESGPGSPAGSPTSTEEGSPAGSPTSTEEGSPAGSPT |
| | STEEGTSESATPESGPGTSTEPSEGSAPGAAEPEA |
| 16 | ASHHHHHHSPAGSPTSTEEGTSESATPESGPGTSTEPSEGSAPGTSESATPESGPGS |
| | EPATSGSETPGTSESATPESGPGSEPATSGSETPGTSESATPESGPGTSTEPSEGSAP |
| | GSPAGSPTSTEEGTSESATPESGPGSEPATSGSETPGTSESATPESGPGSPAGSPTST |
| | EEGSPAGSPTSTEEGTSTEPSEGSAPGTSESATPESGPGTSESATPESGPGTSESATP |
| | ESGPGSEPATSGSETPGSEPATSGSETPGSPAGSPTSTEEGTSTEPSEGSAPGTSTEP |
| | SEGSAPGGSAPQPVSLANTATSGSETPGTDIQMTQSPSSLSASVGDRVTITCKASQD |
| | VSIGVAWYQQKPGKAPKLLIYSASYRYTGVPSRFSGSGSGTDFTLTISSLQPEDFA |
| | TYYCQQYYTYPYTFGQGTKVEIKGATPPETGAETESPGETTGGSAESEPPGEGEV |
| | QLVESGGGLVQPGGSLRLSCAASGFTFTDYTMDWVRQAPGKGLEWVADVNPNS |
| | GGSIYNQRFKGRFTLSVDRSKNTLYLQMNSLRAEDTAVYYCARNLGPSFYFDYW |
| | GQGTLVTVSSGGGGSELVVTQEPSLTVSPGGTVTLTCRSSNGAVTSSNYANWVQ |
| | QKPGQAPRGLIGGTNKRAPGTPARFSGSLLGGKAALTLSGVQPEDEAVYYCALW |
| | YPNLWVFGGGTKLTVLGATPPETGAETESPGETTGGSAESEPPGEGEVQLLESGG |
| | GIVQPGGSLKLSCAASGFTFNTYAMNWVRQAPGKGLEWVARIRSKYNNYATYY |
| | ADSVKDRFTISRDDSKNTVYLQMNNLKTEDTAVYYCVRHENFGNSYVSWFAHW |
| | GQGTLVTVSSGTAEAASASGQPVSLANTPGSPAGSPTSTEEGTSESATPESGPGTST |
| | EPSEGSAPGSPAGSPTSTEEGTSTEPSEGSAPGTSTEPSEGSAPGTSESATPESGPGS |
| | EPATSGSETPGSEPATSGSETPGSPAGSPTSTEEGTSESATPESGPGTSTEPSEGSAP |
| | GTSTEPSEGSAPGSPAGSPTSTEEGTSTEPSEGSAPGTSTEPSEGSAPGTSESATPES |
| | GPGTSTEPSEGSAPGTSESATPESGPGSEPATSGSETPGTSTEPSEGSAPGTSTEPSE |
| | GSAPGTSESATPESGPGTSESATPESGPGSPAGSPTSTEEGTSESATPESGPGSEPAT |
| | SGSETPGTSESATPESGPGTSTEPSEGSAPGTSTEPSEGSAPGTSTEPSEGSAPGTST |
| | EPSEGSAPGTSTEPSEGSAPGTSTEPSEGSAPGSPAGSPTSTEEGTSTEPSEGSAPGT |
| | SESATPESGPGSEPATSGSETPGTSESATPESGPGSEPATSGSETPGTSESATPESGP |
| | GTSTEPSEGSAPGTSESATPESGPGSPAGSPTSTEEGSPAGSPTSTEEGSPAGSPTST |
| | EEGTSESATPESGPGTSTEPSEGSAPGAAEPEA |
| 17 | ASHHHHHHSPAGSPTSTEEGTSESATPESGPGTSTEPSEGSAPGTSESATPESGPGS |
| | EPATSGSETPGTSESATPESGPGSEPATSGSETPGTSESATPESGPGTSTEPSEGSAP |
| | GSPAGSPTSTEEGTSESATPESGPGSEPATSGSETPGTSESATPESGPGSPAGSPTST |
| | EEGSPAGSPTSTEEGTSTEPSEGSAPGTSESATPESGPGTSESATPESGPGTSESATP |
| | ESGPGSEPATSGSETPGSEPATSGSETPGSPAGSPTSTEEGTSTEPSEGSAPGTSTEP |
| | SEGSAPGGSAPGVRGLTGPATSGSETPGTDIQMTQSPSSLSASVGDRVTITCKASQ |
| | DVSIGVAWYQQKPGKAPKLLIYSASYRYTGVPSRFSGSGSGTDFTLTISSLQPEDF |
| | ATYYCQQYYTYPYTFGQGTKVEIKGATPPETGAETESPGETTGGSAESEPPGEGE |
| | VQLVESGGGLVQPGGSLRLSCAASGFTFTDYTMDWVRQAPGKGLEWVADVNPN |
| | SGGSIYNQRFKGRFTLSVDRSKNTLYLQMNSLRAEDTAVYYCARNLGPSFYFDY |
| | WGQGTLVTVSSGGGGSELVVTQEPSLTVSPGGTVTLTCRSSNGAVTSSNYANWV |
| | QQKPGQAPRGLIGGTNKRAPGTPARFSGSLLGGKAALTLSGVQPEDEAVYYCAL |
| | WYPNLWVFGGGTKLTVLGATPPETGAETESPGETTGGSAESEPPGEGEVQLLES |
| | GGGIVQPGGSLKLSCAASGFTFNTYAMNWVRQAPGKGLEWVARIRSKYNNYAT |
| | YYADSVKDRFTISRDDSKNTVYLQMNNLKTEDTAVYYCVRHENFGNSYVSWFAH |
| | WGQGTLVTVSSGTAEAASASGGVRGLTGPPGSPAGSPTSTEEGTSESATPESGPG |
| | TSTEPSEGSAPGSPAGSPTSTEEGTSTEPSEGSAPGTSTEPSEGSAPGTSESATPESG |
| | PGSEPATSGSETPGSEPATSGSETPGSPAGSPTSTEEGTSESATPESGPGTSTEPSEG |
| | SAPGTSTEPSEGSAPGSPAGSPTSTEEGTSTEPSEGSAPGTSTEPSEGSAPGTSESAT |
| | PESGPGTSTEPSEGSAPGTSESATPESGPGSEPATSGSETPGTSTEPSEGSAPGTSTE |
| | PSEGSAPGTSESATPESGPGTSESATPESGPGSPAGSPTSTEEGTSESATPESGPGSE |
| | PATSGSETPGTSESATPESGPGTSTEPSEGSAPGTSTEPSEGSAPGTSTEPSEGSAPG |
| | TSTEPSEGSAPGTSTEPSEGSAPGTSTEPSEGSAPGSPAGSPTSTEEGTSTEPSEGSA |
| | PGTSESATPESGPGSEPATSGSETPGTSESATPESGPGSEPATSGSETPGTSESATPE |
| | SGPGTSTEPSEGSAPGTSESATPESGPGSPAGSPTSTEEGSPAGSPTSTEEGSPAGSP |
| | TSTEEGTSESATPESGPGTSTEPSEGSAPGAAEPEA |
| 18 | SAGSPGSPAGSPTSTEEGTSESATPESGPGTSTEPSEGSAPGSPAGSPTSTEEGTSTE |
| | PSEGSAPGTSTEPSEGSAPGTSESATPESGPGSTPAESGSETPGSEPATSGSETPGSP |
| | AGSPTSTEEGTSESATPESGPGTSTEPSEGSAPGTSTEPSEGSAPGSPAGSPTSTEEG |
| | TSTEPSEGSAPGTSTEPSEGSAPGTSESATPESGPGTSTEPSEGSAPGTSESATPESG |
| | PGSEPATSGSTETPGTSTEPSEGSAPGTSTEPSEGSAPGTSESATPESGPGTSESATP |
| | ESGPGSPAGSPTSTEEGTSESATPESGPGSEPATSGSETPGTSESATPESGPGTSTEP |
| | SEGSAPGTSTEPSEGSAPGTSTEPSEGSAPGTSTEPSEGSAPGTSTEPSEGSAPGTST |
| | EPSEGSAPGSPAGSPTSTEEGTSTEPSEGSAPGTSESATPESGPGSEPATSGSETPGT |
| | SESATPESGPGSEPATSGSETPGTSESATPESGPGTSTEPSEGSAPGTSESATPESGP |
| | GSPAGSPTSTEEGSPAGSPTSTEEGSPAGSPTSTEEGTSESATPESGPGTSTEPSEGS |
| | APGTSESATPESGPGSEPATSGSETPGTSESATPESGPGSEPATSGSETPGTSESATP |
| | ESGPGTSTEPSEGSAPGSPAGSPTSTEEGTSESATPESGPGSEPATSGSETPGTSESA |
| | TPESGPGSPAGSPTSTEEGSPAGSPTSTEEGTSTEPSEGSAPGTSESATPESGPGTSE |
| | SATPESGPGTSESATPESGPGSEPATSGSETPGSEPATSGSETPGSPAGSPTSTEEGT |
| | STEPSEGSAPGTSTEPSEGSAPGSEPATSGSETPGTSESATPESGPGTSTEPSEGSAP |
| | GSPAGSPTSTEEGTSESATPESGPGTSTEPSEGSAPGSPAGSPTSTEEGTSTEPSEGS |
| | APGTSTEPSEGSAPGTSESATPESGPGSEPATSGSETPGSEPATSGSETPGSPAGSPT |
| | STEEGTSESATPESGPGTSTEPSEGSAPGTSTEPSEGSAPGSPAGSPTSTEEGTSTEP |
| | SEGSAPGTSTEPSEGSAPGTSESATPESGPGTSTEPSEGSAPGTSESATPESGPGSEP |
| | ATSGSETPGTSTEPSEGSAPGTSTEPSEGSAPGTSESATPESGPGTESASASGRAAN |
| | ETPPGLTGAATSGSETPGTEIVLTQSPATLSLSPGERATLSCKASQDVSIGVAWYQ |
| | QKPGQAPRLLIYSASYRYSGVPARFSGSGSGTDFTLTISSLEPEDFAVYYCQQYYIY |
| | PYTFGQGTKVEIKGATPPETGAETESPGETTGGSAESEPPGEGQVQLVQSGVEVK |
| | KPGASVKVSCKASGFTFTDYTMDWVRQAPGQGLEWMADVNPNSGGSIYNQRFK |
| | GRVTLTTDSSTTTAYMELKSLQFDDTAVYYCARNLGPSFYFDYWGQGTLVTVSS |
| | GGGSELVVTQEPSLTVSPGGTVTLTCRSSNGAVTSSNYANWVQQKPGQAPRGLIG |
| | GTNKRAPGTPARFSGSLLGGKAALTLSGVQPEDEAVYYCALWYPNLWVFGGGT |
| | KLTVLGATPPETGAETESPGETTGGSAESEPPGEGEVQLLESGGGIVQPGGSLKLS |
| | CAASGFTFNTYAMNWVRQAPGKGLEWVARIRSKYNNYATYYADSVKDRFTISRD |
| | DSKNTVYLQMNNLKTEDTAVYYCVRHENFGNSYVSWFAHWGQGTLVTVSSGTA |
| | EAASASGASGRAANETPPGLTGAGSETPGSPAGSPTSTEEGTSESATPESGPGTSTE |
| | PSEGSAPGTSTEPSEGSAPGSPAGSPTSTEEGTSTEPSEGSAPGTSTEPSEGSAPGTS |
| | ESATPESGPGTSTEPSEGSAPGTSESATPESGPGSEPATSGSETPGTSTEPSEGSAPG |
| | TSTEPSEGSAPGTSESATPESGPGTSESATPESGPGSPAGSPTSTEEGTSESATPESG |
| | PGSEPATSGSETPGTSESATPESGPGTSTEPSEGSAPGTSTEPSEGSAPGTSTEPSEG |
| | SAPGTSTEPSEGSAPGTSTEPSEGSAPGTSTEPSEGSAPGSPAGSPTSTEEGTSTEPS |
| | EGSAPGTSESATPESGPGSEPATSGSETPGTSESATPESGPGSEPATSGSETPGTSES |
| | ATPESGPGTSTEPSEGSAPGTSESATPESGPGSPAGSPTSTEEGSPAGSPTSTEEGSP |
| | AGSPTSTEEGTSESATPESGPGTSTEPSEGSAPGTSESATPESGPGSEPATSGSTETG |
| | TSESATPESGPGSEPATSGSETPGTSESATPESGPGTSTEPSEGSAPGSPAGSPTSTE |
| | EGTSESATPESGPGSEPATS |
| 19 | ASSPAGSPTSTESGTSESATPESGPGTETEPSEGSAPGTSESATPESGPGSEPATSGS |
| | ETPGTSESATPESGPGSTPAESGSETPGTSESATPESGPGTSTEPSEGSAPGSPAGSP |
| | TSTEEGTSESATPESGPGESPATSGSTPEGTSESATPESGPGSPAGSPTSTEEGSPAG |
| | SPTSTEEGTSTEPSEGSAPGTSESATPESGPGTSESATPESGPGTSESATPESGPGSE |
| | PATSGSETPGSEPATSGSETPGSPAGSPTSTEEGTSTEPSEGSAPGTSTEPSEGSAPG |
| | GSAPTTGRAGEAANATSAGATGPATSGSETPGTDIQMTQSPSSLSASVGDRVTITC |
| | RASQDVNTAVAWYQQKPGKAPKLLIYSASFLYSGVPSRFSGSRSGTDFTLTISSLQ |
| | PEDFATYYCQQHYTTPPTFGQGTKVEIKGATPPETGAETESPGETTGGSAESEPP |
| | GEGEVQLVESGGGLVQPGGSLRLSCAASGFNIKDTYIHWVRQAPGKGLEWVARI |
| | YPTNGYTRYADSVKGRFTISADTSKNTAYLQMNSLRAEDTAVYYCSRWGGDGFY |
| | AMDYWGQGTLVTVSSGGGSELVVTQEPSLTVSPGGTVTLTCRSSNGAVTSSNYA |
| | NWVQQKPGQAPRGLIGGTNKRAPGTPARFSGSLLGGKAALTLSGVQPEDEAVYY |
| | CALWYPNLWVFGGGTKLTVLGATPPETGAETESPGETTGGSAESEPPGEGEVQL |
| | LESGGGIVQPGGSLKLSCAASGFTFNTYAMNWVRQAPGKGLEWVARIRSKYNNY |
| | ATYYADSVKDRFTISRDDSKNTVYLQMNNLKTEDTAVYYCVRHENFGNSYVSWF |
| | AHWGQGTLVTVSSGTAEAASASGTTGRAGEAANATSAGATGPSAGSPGSPAGSPT |
| | STEEGTSESATPESGPGTSTEPSEGSAPGSPAGSPTSTEEGTSTEPSEGSAPGTSTEP |
| | SEGSAPGTSESATPESGPGSEPATSGSETPGSEPATSGSETPGSPAGSPTSTEEGTSE |
| | SATPESGPGTSTEPSEGSAPGTSTEPSEGSAPGSPAGSPTSTEEGTSTEPSEGSAPGT |
| | STEPSEGSAPGTSESATPESGPGTSTEPSEGSAPGTSESATPESGPGSEPATSGSETP |
| | GTSTEPSEGSAPGTSTEPSEGSAPGTSESATPESGPGTSESATPESGPGSPAGSPTST |
| | EEGTSESATPESGPGSEPATSGSETPGTSESATPESGPGTSTEPSEGSAPGTSTEPSE |
| | GSAPGTSTEPSEGSAPGTSTEPSEGSAPGTSTEPSEGSAPGTSTEPSEGSAPGSPAGS |
| | PTSTEEGTSTEPSEGSAPGTSESATPESGPGSEPATSGSETPGTSESATPESGPGSEP |
| | ATSGSETPGTSESATPESGPGTSTEPSEGSAPGTSESATPESGPGSPAGSPTSTEEGS |
| | PAGSPTSTEEGSPAGSPTSTEEGTSESATPESGPGTSTEPSEGSAPGTSESATPESGP |
| | GSEPATSGSETPGTSESATPESGPGSEPATSGSETPGTSESATPESGPGTSTEPSEGS |
| | APGSPAGSPTSTEEGTSESATPESGPGSEPATSGSETPGTSESATPESGPGSPAGSPT |
| | STEEGSPAGSPTSTEEGTSTEPSEGSAPGTSESATPESGPGTSESATPESGPGTSESA |
| | TPESGPGSEPATSGSETPGSEPATSGSETPGSPAGSPTSTEEGTSTEPSEGSAPGTST |
| | EPSEGSAPGSEPATSGSETPGTSESATPESGPGTSTEPSEGSAPGSPAGSPTSTEEGT |
| | SESATPESGPGTSTEPSEGSAPGSPAGSPTSTEEGTSTEPSEGSAPGTSTEPSEGSAP |
| | GTSESATPESGPGSEPATSGSETPGSEPATSGSTETPGSPAGSPTSTEEGTSESATPE |
| | SGPGTSTEPSEGSAPGTSTEPSEGSAPGSPAGSPTSTEEGTSTEPSEGSAPGTATESP |
| | EGSAPGTSESATPESGPGTSTEPSEGSAPGTSAESATPESGPGSEPATSGSETPGTST |
| | EPSEGSAPGTSTEPSEGSAPGTSESATPESGPGTESAS |
| 20 | ASHHHHHHSPAGSPTSTEEGTSESATPESGPGTSTEPSEGSAPGTSESATPESGPGS |
| | EPATSGSETPGTSESATPESGPGSEPATSGSETPGTSESATPESGPGTSTEPSEGSAP |
| | GSPAGSPTSTEEGTSESATPESGPGSEPATSGSETPGTSESATPESGPGSPAGSPTST |
| | EEGSPAGSPTSTEEGTSTEPSEGSAPGTSESATPESGPGTSESATPESGPGTSESATP |
| | ESGPGSEPATSGSETPGSEPATSGSETPGSPAGSPTSTEEGTSTEPSEGSAPGTSTEP |
| | SEGSAPGGSAPGPGGVAAAATSGSETPGTDIQMTQSPSSLSASVGDRVTITCKASQ |
| | DVSIGVAWYQQKPGKAPKLLIYSASYRYTGVPSRFSGSGSGTDFTLTISSLQPEDF |
| | ATYYCQQYYTYPYTFGQGTKVEIKGATPPETGAETESPGETTGGSAESEPPGEGE |
| | VQLVESGGGLVQPGGSLRLSCAASGFTFTDYTMDWVRQAPGKGLEWVADVNPN |
| | SGGSIYNQRFKGRFTLSVDRSKNTLYLQMNSLRAEDTAVYYCARNLGPSFYFDY |
| | WGQGTLVTVSSGGGGSELVVTQEPSLTVSPGGTVTLTCRSSNGAVTSSNYANWV |
| | QQKPGQAPRGLIGGTNKRAPGTPARFSGSLLGGKAALTLSGVQPEDEAVYYCAL |
| | WYPNLWVFGGGTKLTVLGATPPETGAETESPGETTGGSAESEPPGEGEVQLLES |
| | GGGIVQPGGSLKLSCAASGFTFNTYAMNWVRQAPGKGLEWVARIRSKYNNYAT |
| | YYADSVKDRFTISRDDSKNTVYLQMNNLKTEDTAVYYCVRHENFGNSYVSWFAH |
| | WGQGTLVTVSSGTAEAASASGGPGGVAAAPGSPAGSPTSTEEGTSESATPESGPG |
| | TSTEPSEGSAPGSPAGSPTSTEEGTSTEPSEGSAPGTSTEPSEGSAPGTSESATPESG |
| | PGSEPATSGSETPGSEPATSGSETPGSPAGSPTSTEEGTSESATPESGPGTSTEPSEG |
| | SAPGTSTEPSEGSAPGSPAGSPTSTEEGTSTEPSEGSAPGTSTEPSEGSAPGTSESAT |
| | PESGPGTSTEPSEGSAPGTSESATPESGPGSEPATSGSETPGTSTEPSEGSAPGTSTE |
| | PSEGSAPGTSESATPESGPGTSESATPESGPGSPAGSPTSTEEGTSESATPESGPGSE |
| | PATSGSETPGTSESATPESGPGTSTEPSEGSAPGTSTEPSEGSAPGTSTEPSEGSAPG |
| | TSTEPSEGSAPGTSTEPSEGSAPGTSTEPSEGSAPGSPAGSPTSTEEGTSTEPSEGSA |
| | PGTSESATPESGPGSEPATSGSETPGTSESATPESGPGSEPATSGSETPGTSESATPE |
| | SGPGTSTEPSEGSAPGTSESATPESGPGSPAGSPTSTEEGSPAGSPTSTEEGSPAGSP |
| | TSTEEGTSESATPESGPGTSTEPSEGSAPGAAEPEA |
| 21 | ASHHHHHHSPAGSPTSTEEGTSESATPESGPGTSTEPSEGSAPGTSESATPESGPGS |
| | EPATSGSETPGTSESATPESGPGSEPATSGSETPGTSESATPESGPGTSTEPSEGSAP |
| | GSPAGSPTSTEEGTSESATPESGPGSEPATSGSETPGTSESATPESGPGSPAGSPTST |
| | EEGSPAGSPTSTEEGTSTEPSEGSAPGTSESATPESGPGTSESATPESGPGTSESATP |
| | ESGPGSEPATSGSETPGSEPATSGSETPGSPAGSPTSTEEGTSTEPSEGSAPGTSTEP |
| | SEGSAPGGSAPVSKRFPVGATSGSETPGTDIQMTQSPSSLSASVGDRVTITCKASQ |
| | DVSIGVAWYQQKPGKAPKLLIYSASYRYTGVPSRFSGSGSGTDFTLTISSLQPEDF |
| | ATYYCQQYYTYPYTFGQGTKVEIKGATPPETGAETESPGETTGGSAESEPPGEGE |
| | VQLVESGGGLVQPGGSLRLSCAASGFTFTDYTMDWVRQAPGKGLEWVADVNPN |
| | SGGSIYNQRFKGRFTLSVDRSKNTLYLQMNSLRAEDTAVYYCARNLGPSFYFDY |
| | WGQGTLVTVSSGGGGSELVVTQEPSLTVSPGGTVTLTCRSSNGAVTSSNYANWV |
| | QQKPGQAPRGLIGGTNKRAPGTPARFSGSLLGGKAALTLSGVQPEDEAVYYCAL |
| | WYPNLWVFGGGTKLTVLGATPPETGAETESPGETTGGSAESEPPGEGEVQLLES |
| | GGGIVQPGGSLKLSCAASGFTFNTYAMNWVRQAPGKGLEWVARIRSKYNNYAT |
| | YYADSVKDRFTISRDDSKNTVYLQMNNLKTEDTAVYYCVRHENFGNSYVSWFAH |
| | WGQGTLVTVSSGTAEAASASGVSKRFPVGPGSPAGSPTSTEEGTSESATPESGPGT |
| | STEPSEGSAPGSPAGSPTSTEEGTSTEPSEGSAPGTSTEPSEGSAPGTSESATPESGP |
| | GSEPATSGSETPGSEPATSGSETPGSPAGSPTSTEEGTSESATPESGPGTSTEPSEGS |
| | APGTSTEPSEGSAPGSPAGSPTSTEEGTSTEPSEGSAPGTSTEPSEGSAPGTSESATP |
| | ESGPGTSTEPSEGSAPGTSESATPESGPGSEPATSGSETPGTSTEPSEGSAPGTSTEP |
| | SEGSAPGTSESATPESGPGTSESATPESGPGSPAGSPTSTEEGTSESATPESGPGSEP |
| | ATSGSETPGTSESATPESGPGTSTEPSEGSAPGTSTEPSEGSAPGTSTEPSEGSAPGT |
| | STEPSEGSAPGTSTEPSEGSAPGTSTEPSEGSAPGSPAGSPTSTEEGTSTEPSEGSAP |
| | GTSESATPESGPGSEPATSGSETPGTSESATPESGPGSEPATSGSETPGTSESATPES |
| | GPGTSTEPSEGSAPGTSESATPESGPGSPAGSPTSTEEGSPAGSPTSTEEGSPAGSPT |
| | STEEGTSESATPESGPGTSTEPSEGSAPGAAEPEA |
| 22 | ASHHHHHHSPAGSPTSTEEGTSESATPESGPGTSTEPSEGSAPGTSESATPESGPGS |
| | EPATSGSETPGTSESATPESGPGSEPATSGSETPGTSESATPESGPGTSTEPSEGSAP |
| | GSPAGSPTSTEEGTSESATPESGPGSEPATSGSETPGTSESATPESGPGSPAGSPTST |
| | EEGSPAGSPTSTEEGTSTEPSEGSAPGTSESATPESGPGTSESATPESGPGTSESATP |
| | ESGPGSEPATSGSETPGSEPATSGSETPGSPAGSPTSTEEGTSTEPSEGSAPGTSTEP |
| | SEGSAPGGSAPGPGGVAAAATSGSETPGTDIQMTQSPSSLSASVGDRVTITCQASQ |
| | DISNYLNWYQQKPGKAPKLLIYDASNLETGVPSRFSGSGSGTDFTFTISSLQPEDIA |
| | TYFCQHFDHLPLAFGGGTKVEIKGATPPETGAETESPGETTGGSAESEPPGEGQV |
| | QLQESGPGLVKPSETLSLTCTVSGGSVSSGDYYWTWIRQSPGKGLEWIGHIYYSG |
| | NTNYNPSLKSRLTISIDTSKTQFSLKLSSVTAADTAIYYCVRDRVTGAFDIWGQGT |
| | MVTVSSGGGGSELVVTQEPSLTVSPGGTVTLTCRSSTGAVTTSNYANWVQQKPG |
| | QAPRGLIGGTNKRAPGTPARFSGSLLGGKAALTLSGVQPEDEAEYYCALWYSNL |
| | WVFGGGTKLTVLGATPPETGAETESPGETTGGSAESEPPGEGEVQLLESGGGLV |
| | QPGGSLKLSCAASGFTFNTYAMNWVRQAPGKGLEWVARIRSKYNNYATYYADS |
| | VKDRFTISRDDSKNTAYLQMNNLKTEDTAVYYCVRHGNFGNSYVSWFAYWGQG |
| | TLVTVSSGTAEAASASGGPGGVAAAPGSPAGSPTSTEEGTSESATPESGPGTSTEPS |
| | EGSAPGSPAGSPTSTEEGTSTEPSEGSAPGTSTEPSEGSAPGTSESATPESGPGSEPA |
| | TSGSETPGSEPATSGSETPGSPAGSPTSTEEGTSESATPESGPGTSTEPSEGSAPGTS |
| | TEPSEGSAPGSPAGSPTSTEEGTSTEPSEGSAPGTSTEPSEGSAPGTSESATPESGPG |
| | TSTEPSEGSAPGTSESATPESGPGSEPATSGSETPGTSTEPSEGSAPGTSTEPSEGSA |
| | PGTSESATPESGPGTSESATPESGPGSPAGSPTSTEEGTSESATPESGPGSEPATSGS |
| | ETPGTSESATPESGPGTSTEPSEGSAPGTSTEPSEGSAPGTSTEPSEGSAPGTSTEPS |
| | EGSAPGTSTEPSEGSAPGTSTEPSEGSAPGSPAGSPTSTEEGTSTEPSEGSAPGTSES |
| | ATPESGPGSEPATSGSETPGTSESATPESGPGSEPATSGSETPGTSESATPESGPGTS |
| | TEPSEGSAPGTSESATPESGPGSPAGSPTSTEEGSPAGSPTSTEEGSPAGSPTSTEEG |
| | TSESATPESGPGTSTEPSEGSAPGAAEPEA |
| 23 | ASSPAGSPTSTESGTSESATPESGPGTSTEPSEGSAPGTSESATPESGPGSEPATSGS |
| | ETPGTSESATPESGPGSTPAESGSETPGTSESATPESGPGTSTEPSEGSAPGSPAGSP |
| | TSTEEGTSESATPESGPGSEPATSGSETPGTSESATPESGPGSPAGSPTSTEEGSPAG |
| | SPTSTEEGTSTEPSEGSAPGTSESATPESGPGTSESATPESGPGTSESATPESGPGSE |
| | PATSGSETPGSEPATSGSETPGSPAGSPTSTEEGTSTEPSEGSAPGTSTEPSEGSAPG |
| | GSAPASGRSTNAGPPGLTGPATSGSETPGTDIQMTQSPSSLSASVGDRVTITCRAS |
| | QDVNTAVAWYQQKPGKAPKLLIYSASFLYSGVPSRFSGSRSGTDFTLTISSLQPED |
| | FATYYCQQHYTTPPTFGQGTKVEIKGATPPETGAETESPGETTGGSAESEPPGEG |
| | EVQLVESGGGLVQPGGSLRLSCAASGFNIKDTYIHWVRQAPGKGLEWVARIYPT |
| | NGYTRYADSVKGRFTISADTSKNTAYLQMNSLRAEDTAVYYCSRWGGDGFYAM |
| | DYWGQGTLVTVSSGGGSELVVTQEPSLTVSPGGTVTLTCRSSTGAVTTSNYANW |
| | VQQKPGQAPRGLIGGTNKRAPGTPARFSGSLLGGKAALTLSGVQPEDEAEYYCA |
| | LWYSNLWVFGGGTKLTVLGATPPETGAETESPGETTGGSAESEPPGEGEVQLLE |
| | SGGGLVQPGGSLKLSCAASGFTFNTYAMNWVRQAPGKGLEWVARIRSKYNNYA |
| | TYYADSVKDRFTISRDDSKNTAYLQMNNLKTEDTAVYYCVRHGNFGNSYVSWFA |
| | YWGQGTLVTVSSGTAEAASASGASGRSTNAGPPGLTGPPGSPAGSPTSTEEGTSES |
| | ATPESGPGSEPATSGSETPGTSESATPESGPGTSTEPSEGSAPGTSTEPSEGSAPGTS |
| | TEPSEGSAPGTSTEPSEGSAPGTSTEPSEGSAPGTSTEPSEGSAPGSPAGSPTSTEEG |
| | TSTEPSEGSAPGTSESATPESGPGSEPATSGSETPGTSESATPESGPGSEPATSGSET |
| | PGTSESATPESGPGTSTEPSEGSAPGTSESATPESGPGSPAGSPTSTEEGSPAGSPTS |
| | TEEGSPAGSPTSTEEGTSESATPESGPGTSTEPSEGSAPGTSESATPESGPGSEPATS |
| | GSETPGTSESATPESGPGSEPATSGSETPGTSESATPESGPGTSTEPSEGSAPGSPAG |
| | SPTSTEEGTSESATPESGPGSEPATSGSETPGTSESATPESGPGSPAGSPTSTEEGSP |
| | AGSPTSTEEGTSTEPSEGSAPGTSESATPESGPGTSESATPESGPGTSESATPESGPG |
| | SEPATSGSETPGSEPATSGSETPGSPAGSPTSTEEGTSTEPSEGSAPGTESTPSEGSA |
| | PGSEPATSGSETPGTSESATPESGPGTSTEPSEGSAPG |
| 24 | ASHHHHHHSPAGSPTSTEEGTSESATPESGPGTSTEPSEGSAPGTSESATPESGPGS |
| | EPATSGSETPGTSESATPESGPGSEPATSGSETPGTSESATPESGPGTSTEPSEGSAP |
| | GSPAGSPTSTEEGTSESATPESGPGSEPATSGSETPGTSESATPESGPGSPAGSPTST |
| | EEGSPAGSPTSTEEGTSTEPSEGSAPGTSESATPESGPGTSESATPESGPGTSESATP |
| | ESGPGSEPATSGSETPGSEPATSGSETPGSPAGSPTSTEEGTSTEPSEGSAPGTSTEP |
| | SEGSAPGGSAPQPAHLTFPATSGSETPGTDIQMTQSPSSLSASVGDRVTITCKASQD |
| | VSIGVAWYQQKPGKAPKLLIYSASYRYTGVPSRFSGSGSGTDFTLTISSLQPEDFA |
| | TYYCQQYYIYPYTFGQGTKVEIKGATPPETGAETESPGETTGGSAESEPPGEGEV |
| | QLVESGGGLVQPGGSLRLSCAASGFTFTDYTMDWVRQAPGKGLEWVADVNPNS |
| | GGSIYNQRFKGRFTLSVDRSKNTLYLQMNSLRAEDTAVYYCARNLGPSFYFDYW |
| | GQGTLVTVSSGGGGSELVVTQEPSLTVSPGGTVTLTCRSSNGAVTSSNYANWVQ |
| | QKPGQAPRGLIGGTNKRAPGTPARFSGSLLGGKAALTLSGVQPEDEAVYYCALW |
| | YPNLWVFGGGTKLTVLGATPPETGAETESPGETTGGSAESEPPGEGEVQLLESGG |
| | GIVQPGGSLKLSCAASGFTFNTYAMNWVRQAPGKGLEWVARIRSKYNNYATYY |
| | ADSVKDRFTISRDDSKNTVYLQMNNLKTEDTAVYYCVRHENFGNSYVSWFAHW |
| | GQGTLVTVSSGTAEAASASGQPAHLTFPPGSPAGSPTSTEEGTSESATPESGPGTST |
| | EPSEGSAPGSPAGSPTSTEEGTSTEPSEGSAPGTSTEPSEGSAPGTSESATPESGPGS |
| | EPATSGSETPGSEPATSGSETPGSPAGSPTSTEEGTSESATPESGPGTSTEPSEGSAP |
| | GTSTEPSEGSAPGSPAGSPTSTEEGTSTEPSEGSAPGTSTEPSEGSAPGTSESATPES |
| | GPGTSTEPSEGSAPGTSESATPESGPGSEPATSGSETPGTSTEPSEGSAPGTSTEPSE |
| | GSAPGTSESATPESGPGTSESATPESGPGSPAGSPTSTEEGTSESATPESGPGSEPAT |
| | SGSETPGTSESATPESGPGTSTEPSEGSAPGTSTEPSEGSAPGTSTEPSEGSAPGTST |
| | EPSEGSAPGTSTEPSEGSAPGTSTEPSEGSAPGSPAGSPTSTEEGTSTEPSEGSAPGT |
| | SESATPESGPGSEPATSGSETPGTSESATPESGPGSEPATSGSETPGTSESATPESGP |
| | GTSTEPSEGSAPGTSESATPESGPGSPAGSPTSTEEGSPAGSPTSTEEGSPAGSPTST |
| | EEGTSESATPESGPGTSTEPSEGSAPGAAEPEA |
| 25 | ASSPAGSPTSTESGTSESATPESGPGTSTEPSEGSAPGTSESATPESGPGSEPATSGS |
| | ETPGTSESATPESGPGSTPAESGSETPGTSESATPESGPGTSTEPSEGSAPGSPAGSP |
| | TSTEEGTSESATPESGPGEEPATSGSTPEGTSESATPESGPGSPAGSPTSTEEGSPAG |
| | SPTSTEEGTSTEPSEGSAPGTSESATPESGPGTSESATPESGPGTSESATPESGPGSE |
| | PATSGSETPGSEPATSGSETPGSPAGSPTSTEEGTSTEPSEGSAPGTSTEPSEGSAPG |
| | GSAPEAGRSANHTPAGLTGPATSGSETPGTDIQMTQSPSSLSASVGDRVTITCRAS |
| | QDVNTAVAWYQQKPGKAPKLLIYSASFLYSGVPSRFSGSRSGTDFTLTISSLQPED |
| | FATYYCQQHYTTPPTFGQGTKVEIKGATPPETGAETESPGETTGGSAESEPPGEG |
| | EVQLVESGGGLVQPGGSLRLSCAASGFNIKDTYIHWVRQAPGKGLEWVARIYPT |
| | NGYTRYADSVKGRFTISADTSKNTAYLQMNSLRAEDTAVYYCSRWGGDGFYAM |
| | DYWGQGTLVTVSSGGGSELVVTQEPSLTVSPGGTVTLTCRSSNGAVTSSNYANW |
| | VQQKPGQAPRGLIGGTNKRAPGTPARFSGSLLGGKAALTLSGVQPEDEAVYYCA |
| | LWYPNLWVFGGGTKLTVLGATPPETGAETESPGETTGGSAESEPPGEGEVQLLE |
| | SGGGIVQPGGSLKLSCAASGFTFNTYAMNWVRQAPGKGLEWVARIRSKYNNYAT |
| | YYADSVKDRFTISRDDSKNTVYLQMNNLKTEDTAVYYCVRHENFGNSYVSWFAH |
| | WGQGTLVTVSSGTAEAASASGEAGRSANHTPAGLTGPSAGSPGSPAGSPTSTEEG |
| | TSESATPESGPGTSTEPSEGSAPGSPAGSPTSTEEGTSTEPSEGSAPGTSTEPSEGSA |
| | PGTSESATPESGPGSEPATSGSETPGSEPATSGSETPGSPAGSPTSTEEGTSESATPE |
| | SGPGTSTEPSEGSAPGTSTEPSEGSAPGSPAGSPTSTEEGTSTEPSEGSAPGTSTEPS |
| | EGSAPGTSESATPESGPGTSTEPSEGSAPGTSESATPESGPGSEPATSGSETPGTSTE |
| | PSEGSAPGTSTEPSEGSAPGTSESATPESGPGTSESATPESGPGSPAGSPTSTEEGTS |
| | ESATPESGPGSEPATSGSETPGTSESATPESGPGTSTEPSEGSAPGTSTEPSEGSAPG |
| | TSTEPSEGSAPGTSTEPSEGSAPGTSTEPSEGSAPGTSTEPSEGSAPGSPAGSPTSTE |
| | EGTSTEPSEGSAPGTSESATPESGPGSEPATSGSETPGTSESATPESGPGSEPATSGS |
| | ETPGTSESATPESGPGTSTEPSEGSAPGTSESATPESGPGSPAGSPTSTEEGSPAGSP |
| | TSTEEGSPAGSPTSTEEGTSESATPESGPGTSTEPSEGSAPGTSESATPESGPGSEPA |
| | TSGSETPGTSESATPESGPGSEPATSGSETPGTSESATPESGPGTSTEPSEGSAPGSP |
| | AGSPTSTEEGTSESATPESGPGSEPATSGSETPGTSESATPESGPGSPAGSPTSTEEG |
| | SPAGSPTSTEEGTSTEPSEGSAPGTSESATPESGPGTSESATPESGPGTSESATPESG |
| | PGSEPATSGSETPGSEPATSGSETPGSPAGSPTSTEEGTSTEPSEGSAPGTSTEPSEG |
| | SAPGSEPATSGSETPGTSESATPESGPGTSTEPSEGSAPGSPAGSPTSTEEGTSESAT |
| | PESGPGTSTEPSEGSAPGSPAGSPTSTEEGTSTEPSEGSAPGTSTEPSEGSAPGTSES |
| | ATPESGPGSEPATSGSETPGSEPATSGSTETPGSPAGSPTSTEEGTSESATPESGPGT |
| | STEPSEGSAPGTSTEPSEGSAPGSPAGSPTSTEEGTSTEPSEGSAPGTATESPEGSAP |
| | GTSESATPESGPGTSTEPSEGSAPGTSAESATPESGPGSEPATSGSETPGTSTEPSEG |
| | SAPGTSTEPSEGSAPGTSESATPESGPGTESAS |
| 26 | ASHHHHHHSPAGSPTSTEEGTSESATPESGPGTSTEPSEGSAPGTSESATPESGPGS |
| | EPATSGSETPGTSESATPESGPGSEPATSGSETPGTSESATPESGPGTSTEPSEGSAP |
| | GSPAGSPTSTEEGTSESATPESGPGSEPATSGSETPGTSESATPESGPGSPAGSPTST |
| | EEGSPAGSPTSTEEGTSTEPSEGSAPGTSESATPESGPGTSESATPESGPGTSESATP |
| | ESGPGSEPATSGSETPGSEPATSGSETPGSPAGSPTSTEEGTSTEPSEGSAPGTSTEP |
| | SEGSAPGGSAPEAGSPGKDGVRGLTGPATSGSETPGTDIQMTQSPSSLSASVGDRV |
| | TITCKASQDVSIGVAWYQQKPGKAPKLLIYSASYRYTGVPSRFSGSGSGTDFTLTI |
| | SSLQPEDFATYYCQQYYTYPYTFGQGTKVEIKGATPPETGAETESPGETTGGSAES |
| | EPPGEGEVQLVESGGGLVQPGGSLRLSCAASGFTFTDYTMDWVRQAPGKGLEW |
| | VADVNPNSGGSIYNQRFKGRFTLSVDRSKNTLYLQMNSLRAEDTAVYYCARNLG |
| | PSFYFDYWGQGTLVTVSSGGGGSELVVTQEPSLTVSPGGTVTLTCRSSNGAVTSS |
| | NYANWVQQKPGQAPRGLIGGTNKRAPGTPARFSGSLLGGKAALTLSGVQPEDEA |
| | VYYCALWYPNLWVFGGGTKLTVLGATPPETGAETESPGETTGGSAESEPPGEGE |
| | VQLLESGGGIVQPGGSLKLSCAASGFTFNTYAMNWVRQAPGKGLEWVARIRSKY |
| | NNYATYYADSVKDRFTISRDDSKNTVYLQMNNLKTEDTAVYYCVRHENFGNSYV |
| | SWFAHWGQGTLVTVSSGTAEAASASGEAGSPGKDGVRGLTGPPGSPAGSPTSTE |
| | EGTSESATPESGPGTSTEPSEGSAPGSPAGSPTSTEEGTSTEPSEGSAPGTSTEPSEG |
| | SAPGTSESATPESGPGSEPATSGSETPGSEPATSGSETPGSPAGSPTSTEEGTSESAT |
| | PESGPGTSTEPSEGSAPGTSTEPSEGSAPGSPAGSPTSTEEGTSTEPSEGSAPGTSTE |
| | PSEGSAPGTSESATPESGPGTSTEPSEGSAPGTSESATPESGPGSEPATSGSETPGTS |
| | TEPSEGSAPGTSTEPSEGSAPGTSESATPESGPGTSESATPESGPGSPAGSPTSTEEG |
| | TSESATPESGPGSEPATSGSETPGTSESATPESGPGTSTEPSEGSAPGTSTEPSEGSA |
| | PGTSTEPSEGSAPGTSTEPSEGSAPGTSTEPSEGSAPGTSTEPSEGSAPGSPAGSPTS |
| | TEEGTSTEPSEGSAPGTSESATPESGPGSEPATSGSETPGTSESATPESGPGSEPATS |
| | GSETPGTSESATPESGPGTSTEPSEGSAPGTSESATPESGPGSPAGSPTSTEEGSPAG |
| | SPTSTEEGSPAGSPTSTEEGTSESATPESGPGTSTEPSEGSAPGAAEPEA |
| 27 | ASSPAGSPTSTESGTSESATPESGPGTSTEPSEGSAPGTSESATPESGPGSEPATSGS |
| | ETPGTSESATPESGPGSTPAESGSETPGTSESATPESGPGTSTEPSEGSAPGSPAGSP |
| | TSTEEGTSESATPESGPGSEPATSGSETPGTSESATPESGPGSPAGSPTSTEEGSPAG |
| | SPTSTEEGTSTEPSEGSAPGTSESATPESGPGTSESATPESGPGTSESATPESGPGSE |
| | PATSGSETPGSEPATSGSETPGSPAGSPTSTEEGTSTEPSEGSAPGTSTEPSEGSAPG |
| | GSAPRTGRTGESANETPAGLGGPATSGSETPGTEIVLTQSPATLSLSPGERATLSC |
| | KASQDVSIGVAWYQQKPGQAPRLLIYSASYRYSGVPARFSGSGSGTDFTLTISSLE |
| | PEDFAVYYCQQYYIYPYTFGQGTKVEIKGATPPETGAETESPGETTGGSAESEPPG |
| | EGQVQLVQSGVEVKKPGASVKVSCKASGFTFTDYTMDWVRQAPGQGLEWMAD |
| | VNPNSGGSIYNQRFKGRVTLTTDSSTTTAYMELKSLQFDDTAVYYCARNLGPSFY |
| | FDYWGQGTLVTVSSGGGSELVVTQEPSLTVSPGGTVTLTCRSSNGAVTSSNYAN |
| | WVQQKPGQAPRGLIGGTNKRAPGTPARFSGSLLGGKAALTLSGVQPEDEAVYYC |
| | ALWYPNLWVFGGGTKLTVLGATPPETGAETESPGETTGGSAESEPPGEGEVQLL |
| | ESGGGIVQPGGSLKLSCAASGFTFNTYAMNWVRQAPGKGLEWVARIRSKYNNYA |
| | TYYADSVKDRFTISRDDSKNTVYLQMNNLKTEDTAVYYCVRHENFGNSYVSWFA |
| | HWGQGTLVTVSSGTAEAASASGRTGRTGESANETPAGLGGPGSETPGSPAGSPTS |
| | TEEGTSESATPESGPGTSTEPSEGSAPGTSTEPSEGSAPGSPAGSPTSTEEGTSTEPS |
| | EGSAPGTSTEPSEGSAPGTSESATPESGPGTSTEPSEGSAPGTSESATPESGPGSEPA |
| | TSGSETPGTSTEPSEGSAPGTSTEPSEGSAPGTSESATPESGPGTSESATPESGPGSP |
| | AGSPTSTEEGTSESATPESGPGSEPATSGSETPGTSESATPESGPGTSTEPSEGSAPG |
| | TSTEPSEGSAPGTSTEPSEGSAPGTSTEPSEGSAPGTSTEPSEGSAPGTSTEPSEGSA |
| | PGSPAGSPTSTEEGTSTEPSEGSAPGTSESATPESGPGSEPATSGSETPGTSESATPE |
| | SGPGSEPATSGSETPGTSESATPESGPGTSTEPSEGSAPGTSESATPESGPGSPAGSP |
| | TSTEEGSPAGSPTSTEEGSPAGSPTSTEEGTSESATPESGPGTSTEPSEGSAPGTSES |
| | ATPESGPGSEPATSGSTETGTSESATPESGPGSEPATSGSETPGTSESATPESGPGTS |
| | TEPSEGSAPGSPAGSPTSTEEGTSESATPESGPGSEPATS |
| 28 | ASHHHHHHSPAGSPTSTEEGTSESATPESGPGTSTEPSEGSAPGTSESATPESGPGS |
| | EPATSGSETPGTSESATPESGPGSEPATSGSETPGTSESATPESGPGTSTEPSEGSAP |
| | GSPAGSPTSTEEGTSESATPESGPGSEPATSGSETPGTSESATPESGPGSPAGSPTST |
| | EEGSPAGSPTSTEEGTSTEPSEGSAPGTSESATPESGPGTSESATPESGPGTSESATP |
| | ESGPGSEPATSGSETPGSEPATSGSETPGSPAGSPTSTEEGTSTEPSEGSAPGTSTEP |
| | SEGSAPGGSAPSPEAQAAAATSGSETPGTDIQMTQSPSSLSASVGDRVTITCKASQ |
| | DVSIGVAWYQQKPGKAPKLLIYSASYRYTGVPSRFSGSGSGTDFTLTISSLQPEDF |
| | ATYYCQQYYTYPYTFGQGTKVEIKGATPPETGAETESPGETTGGSAESEPPGEGE |
| | VQLVESGGGLVQPGGSLRLSCAASGFTFTDYTMDWVRQAPGKGLEWVADVNPN |
| | SGGSIYNQRFKGRFTLSVDRSKNTLYLQMNSLRAEDTAVYYCARNLGPSFYFDY |
| | WGQGTLVTVSSGGGGSELVVTQEPSLTVSPGGTVTLTCRSSNGAVTSSNYANWV |
| | QQKPGQAPRGLIGGTNKRAPGTPARFSGSLLGGKAALTLSGVQPEDEAVYYCAL |
| | WYPNLWVFGGGTKLTVLGATPPETGAETESPGETTGGSAESEPPGEGEVQLLES |
| | GGGIVQPGGSLKLSCAASGFTFNTYAMNWVRQAPGKGLEWVARIRSKYNNYAT |
| | YYADSVKDRFTISRDDSKNTVYLQMNNLKTEDTAVYYCVRHENFGNSYVSWFAH |
| | WGQGTLVTVSSGTAEAASASGSPEAQAAAPGSPAGSPTSTEEGTSESATPESGPGT |
| | STEPSEGSAPGSPAGSPTSTEEGTSTEPSEGSAPGTSTEPSEGSAPGTSESATPESGP |
| | GSEPATSGSETPGSEPATSGSETPGSPAGSPTSTEEGTSESATPESGPGTSTEPSEGS |
| | APGTSTEPSEGSAPGSPAGSPTSTEEGTSTEPSEGSAPGTSTEPSEGSAPGTSESATP |
| | ESGPGTSTEPSEGSAPGTSESATPESGPGSEPATSGSETPGTSTEPSEGSAPGTSTEP |
| | SEGSAPGTSESATPESGPGTSESATPESGPGSPAGSPTSTEEGTSESATPESGPGSEP |
| | ATSGSETPGTSESATPESGPGTSTEPSEGSAPGTSTEPSEGSAPGTSTEPSEGSAPGT |
| | STEPSEGSAPGTSTEPSEGSAPGTSTEPSEGSAPGSPAGSPTSTEEGTSTEPSEGSAP |
| | GTSESATPESGPGSEPATSGSETPGTSESATPESGPGSEPATSGSETPGTSESATPES |
| | GPGTSTEPSEGSAPGTSESATPESGPGSPAGSPTSTEEGSPAGSPTSTEEGSPAGSPT |
| | STEEGTSESATPESGPGTSTEPSEGSAPGAAEPEA |
| 29 | ASHHHHHHSPAGSPTSTEEGTSESATPESGPGTSTEPSEGSAPGTSESATPESGPGS |
| | EPATSGSETPGTSESATPESGPGSEPATSGSETPGTSESATPESGPGTSTEPSEGSAP |
| | GSPAGSPTSTEEGTSESATPESGPGSEPATSGSETPGTSESATPESGPGSPAGSPTST |
| | EEGSPAGSPTSTEEGTSTEPSEGSAPGTSESATPESGPGTSESATPESGPGTSESATP |
| | ESGPGSEPATSGSETPGSEPATSGSETPGSPAGSPTSTEEGTSTEPSEGSAPGTSTEP |
| | SEGSAPGGSAPLTSDLQAQATSGSETPGTDIQMTQSPSSLSASVGDRVTITCQASQ |
| | DISNYLNWYQQKPGKAPKLLIYDASNLETGVPSRFSGSGSGTDFTFTISSLQPEDIA |
| | TYFCQHFDHLPLAFGGGTKVEIKGATPPETGAETESPGETTGGSAESEPPGEGQV |
| | QLQESGPGLVKPSETLSLTCTVSGGSVSSGDYYWTWIRQSPGKGLEWIGHIYYSG |
| | NTNYNPSLKSRLTISIDTSKTQFSLKLSSVTAADTAIYYCVRDRVTGAFDIWGQGT |
| | MVTVSSGGGGSELVVTQEPSLTVSPGGTVTLTCRSSTGAVTTSNYANWVQQKPG |
| | QAPRGLIGGTNKRAPGTPARFSGSLLGGKAALTLSGVQPEDEAEYYCALWYSNL |
| | WVFGGGTKLTVLGATPPETGAETESPGETTGGSAESEPPGEGEVQLLESGGGLV |
| | QPGGSLKLSCAASGFTFNTYAMNWVRQAPGKGLEWVARIRSKYNNYATYYADS |
| | VKDRFTISRDDSKNTAYLQMNNLKTEDTAVYYCVRHGNFGNSYVSWFAYWGQG |
| | TLVTVSSGTAEAASASGLTSDLQAQPGSPAGSPTSTEEGTSESATPESGPGTSTEPS |
| | EGSAPGSPAGSPTSTEEGTSTEPSEGSAPGTSTEPSEGSAPGTSESATPESGPGSEPA |
| | TSGSETPGSEPATSGSETPGSPAGSPTSTEEGTSESATPESGPGTSTEPSEGSAPGTS |
| | TEPSEGSAPGSPAGSPTSTEEGTSTEPSEGSAPGTSTEPSEGSAPGTSESATPESGPG |
| | TSTEPSEGSAPGTSESATPESGPGSEPATSGSETPGTSTEPSEGSAPGTSTEPSEGSA |
| | PGTSESATPESGPGTSESATPESGPGSPAGSPTSTEEGTSESATPESGPGSEPATSGS |
| | ETPGTSESATPESGPGTSTEPSEGSAPGTSTEPSEGSAPGTSTEPSEGSAPGTSTEPS |
| | EGSAPGTSTEPSEGSAPGTSTEPSEGSAPGSPAGSPTSTEEGTSTEPSEGSAPGTSES |
| | ATPESGPGSEPATSGSETPGTSESATPESGPGSEPATSGSETPGTSESATPESGPGTS |
| | TEPSEGSAPGTSESATPESGPGSPAGSPTSTEEGSPAGSPTSTEEGSPAGSPTSTEEG |
| | TSESATPESGPGTSTEPSEGSAPGAAEPEA |
| 30 | ASHHHHHHSPAGSPTSTEEGTSESATPESGPGTSTEPSEGSAPGTSESATPESGPGS |
| | EPATSGSETPGTSESATPESGPGSEPATSGSETPGTSESATPESGPGTSTEPSEGSAP |
| | GSPAGSPTSTEEGTSESATPESGPGSEPATSGSETPGTSESATPESGPGSPAGSPTST |
| | EEGSPAGSPTSTEEGTSTEPSEGSAPGTSESATPESGPGTSESATPESGPGTSESATP |
| | ESGPGSEPATSGSETPGSEPATSGSETPGSPAGSPTSTEEGTSTEPSEGSAPGTSTEP |
| | SEGSAPGGSAPQPAHLTFPATSGSETPGTDIQMTQSPSSLSASVGDRVTITCQASQD |
| | ISNYLNWYQQKPGKAPKLLIYDASNLETGVPSRFSGSGSGTDFTFTISSLQPEDIAT |
| | YFCQHFDHLPLAFGGGTKVEIKGATPPETGAETESPGETTGGSAESEPPGEGQVQ |
| | LQESGPGLVKPSETLSLTCTVSGGSVSSGDYYWTWIRQSPGKGLEWIGHIYYSGN |
| | TNYNPSLKSRLTISIDTSKTQFSLKLSSVTAADTAIYYCVRDRVTGAFDIWGQGTM |
| | VTVSSGGGGSELVVTQEPSLTVSPGGTVTLTCRSSTGAVTTSNYANWVQQKPGQ |
| | APRGLIGGTNKRAPGTPARFSGSLLGGKAALTLSGVQPEDEAEYYCALWYSNLW |
| | VFGGGTKLTVLGATPPETGAETESPGETTGGSAESEPPGEGEVQLLESGGGLVQP |
| | GGSLKLSCAASGFTFNTYAMNWVRQAPGKGLEWVARIRSKYNNYATYYADSVK |
| | DRFTISRDDSKNTAYLQMNNLKTEDTAVYYCVRHGNFGNSYVSWFAYWGQGTL |
| | VTVSSGTAEAASASGQPAHLTFPPGSPAGSPTSTEEGTSESATPESGPGTSTEPSEG |
| | SAPGSPAGSPTSTEEGTSTEPSEGSAPGTSTEPSEGSAPGTSESATPESGPGSEPATS |
| | GSETPGSEPATSGSETPGSPAGSPTSTEEGTSESATPESGPGTSTEPSEGSAPGTSTE |
| | PSEGSAPGSPAGSPTSTEEGTSTEPSEGSAPGTSTEPSEGSAPGTSESATPESGPGTS |
| | TEPSEGSAPGTSESATPESGPGSEPATSGSETPGTSTEPSEGSAPGTSTEPSEGSAPG |
| | TSESATPESGPGTSESATPESGPGSPAGSPTSTEEGTSESATPESGPGSEPATSGSET |
| | PGTSESATPESGPGTSTEPSEGSAPGTSTEPSEGSAPGTSTEPSEGSAPGTSTEPSEG |
| | SAPGTSTEPSEGSAPGTSTEPSEGSAPGSPAGSPTSTEEGTSTEPSEGSAPGTSESAT |
| | PESGPGSEPATSGSETPGTSESATPESGPGSEPATSGSETPGTSESATPESGPGTSTE |
| | PSEGSAPGTSESATPESGPGSPAGSPTSTEEGSPAGSPTSTEEGSPAGSPTSTEEGTS |
| | ESATPESGPGTSTEPSEGSAPGAAEPEA |
| 31 | ASSPAGSPTSTESGTSESATPESGPGTSTEPSEGSAPGTSESATPESGPGSEPATSGS |
| | ETPGTSESATPESGPGSTPAESGSETPGTSESATPESGPGTSTEPSEGSAPGSPAGSP |
| | TSTEEGTSESATPESGPGEEPATSGSTPEGTSESATPESGPGSPAGSPTSTEEGSPAG |
| | SPTSTEEGTSTEPSEGSAPGTSESATPESGPGTSESATPESGPGTSESATPESGPGSE |
| | PATSGSETPGSEPATSGSETPGSPAGSPTSTEEGTSTEPSEGSAPGTSTEPSEGSAPG |
| | GSAPGAGRTDNHEPLELGAAATSGSETPGTDIQMTQSPSSLSASVGDRVTITCRAS |
| | QDVNTAVAWYQQKPGKAPKLLIYSASFLYSGVPSRFSGSRSGTDFTLTISSLQPED |
| | FATYYCQQHYTTPPTFGQGTKVEIKGATPPETGAETESPGETTGGSAESEPPGEG |
| | EVQLVESGGGLVQPGGSLRLSCAASGFNIKDTYIHWVRQAPGKGLEWVARIYPT |
| | NGYTRYADSVKGRFTISADTSKNTAYLQMNSLRAEDTAVYYCSRWGGDGFYAM |
| | DYWGQGTLVTVSSGGGSELVVTQEPSLTVSPGGTVTLTCRSSTGAVTTSNYANW |
| | VQQKPGQAPRGLIGGTNKRAPGTPARFSGSSLGGSAALTLSGVQPEDEAEYYCAL |
| | WYSNLWVFGGGTKLTVLGATPPETGAETESPGETTGGSAESEPPGEGEVQLQES |
| | GGGLVQPGGSLKLSCAASGFTFNTYAMNWVRQAPGKGLEWVARIRSKYNNYAT |
| | YYADSVKDRFTISRDDSKNTAYLQMNNLKTEDTAVYYCVRHGNFGNSYVSWFAY |
| | WGQGTLVTVSSGTAEAASASGGAGRTDNHEPLELGAAPGSPAGSPTSTEEGTSES |
| | ATPESGPGTSTEPSEGSAPGSPAGSPTSTEEGTSTEPSEGSAPGTSTEPSEGSAPGTS |
| | ESATPESGPGSEPATSGSETPGSEPATSGSETPGSPAGSPTSTEEGTSESATPESGPG |
| | TSTEPSEGSAPGTSTEPSEGSAPGSPAGSPTSTEEGTSTEPSEGSAPGTSTEPSEGSA |
| | PGTSESATPESGPGTSTEPSEGSAPGTSESATPESGPGSEPATSGSETPGTSTEPSEG |
| | SAPGTSTEPSEGSAPGTSESATPESGPGTSESATPESGPGSPAGSPTSTEEGTSESAT |
| | PESGPGSEPATSGSETPGTSESATPESGPGTSTEPSEGSAPGTSTEPSEGSAPGTSTE |
| | PSEGSAPGTSTEPSEGSAPGTSTEPSEGSAPGTSTEPSEGSAPGSPAGSPTSTEEGTS |
| | TEPSEGSAPGTSESATPESGPGSEPATSGSETPGTSESATPESGPGSEPATSGSETPG |
| | TSESATPESGPGTSTEPSEGSAPGTSESATPESGPGSPAGSPTSTEEGSPAGSPTSTE |
| | EGSPAGSPTSTEEGTSESATPESGPGTSTEPSEGSAPGTSESATPESGPGSEPATSGS |
| | ETPGTSESATPESGPGSEPATSGSETPGTSESATPESGPGTSTEPSEGSAPGSPAGSP |
| | TSTEEGTSESATPESGPGSEPATSGSETPGTSESATPESGPGSPAGSPTSTEEGSPAG |
| | SPTSTEEGTSTEPSEGSAPGTSESATPESGPGTSESATPESGPGftabTSESATPESGP |
| | GSEPATSGPTESGSEPATSGSETPGSPAGSPTSTEEGTSTEPSEGSAPGTESTPSEGS |
| | APGSEPATSGSETPGTSESATPESGPGTSTEPSEGSAPGEPEA |
| 32 | ASHHHHHHSPAGSPTSTEEGTSESATPESGPGTSTEPSEGSAPGTSESATPESGPGS |
| | EPATSGSETPGTSESATPESGPGSEPATSGSETPGTSESATPESGPGTSTEPSEGSAP |
| | GSPAGSPTSTEEGTSESATPESGPGSEPATSGSETPGTSESATPESGPGSPAGSPTST |
| | EEGSPAGSPTSTEEGTSTEPSEGSAPGTSESATPESGPGTSESATPESGPGTSESATP |
| | ESGPGSEPATSGSETPGSEPATSGSETPGSPAGSPTSTEEGTSTEPSEGSAPGTSTEP |
| | SEGSAPGGSAPQPVSLANTATSGSETPGTDIQMTQSPSSLSASVGDRVTITCQASQD |
| | ISNYLNWYQQKPGKAPKLLIYDASNLETGVPSRFSGSGSGTDFTFTISSLQPEDIAT |
| | YFCQHFDHLPLAFGGGTKVEIKGATPPETGAETESPGETTGGSAESEPPGEGQVQ |
| | LQESGPGLVKPSETLSLTCTVSGGSVSSGDYYWTWIRQSPGKGLEWIGHIYYSGN |
| | TNYNPSLKSRLTISIDTSKTQFSLKLSSVTAADTAIYYCVRDRVTGAFDIWGQGTM |
| | VTVSSGGGGSELVVTQEPSLTVSPGGTVTLTCRSSTGAVTTSNYANWVQQKPGQ |
| | APRGLIGGTNKRAPGTPARFSGSLLGGKAALTLSGVQPEDEAEYYCALWYSNLW |
| | VFGGGTKLTVLGATPPETGAETESPGETTGGSAESEPPGEGEVQLLESGGGLVQP |
| | GGSLKLSCAASGFTFNTYAMNWVRQAPGKGLEWVARIRSKYNNYATYYADSVK |
| | DRFTISRDDSKNTAYLQMNNLKTEDTAVYYCVRHGNFGNSYVSWFAYWGQGTL |
| | VTVSSGTAEAASASGQPVSLANTPGSPAGSPTSTEEGTSESATPESGPGTSTEPSEG |
| | SAPGSPAGSPTSTEEGTSTEPSEGSAPGTSTEPSEGSAPGTSESATPESGPGSEPATS |
| | GSETPGSEPATSGSETPGSPAGSPTSTEEGTSESATPESGPGTSTEPSEGSAPGTSTE |
| | PSEGSAPGSPAGSPTSTEEGTSTEPSEGSAPGTSTEPSEGSAPGTSESATPESGPGTS |
| | TEPSEGSAPGTSESATPESGPGSEPATSGSETPGTSTEPSEGSAPGTSTEPSEGSAPG |
| | TSESATPESGPGTSESATPESGPGSPAGSPTSTEEGTSESATPESGPGSEPATSGSET |
| | PGTSESATPESGPGTSTEPSEGSAPGTSTEPSEGSAPGTSTEPSEGSAPGTSTEPSEG |
| | SAPGTSTEPSEGSAPGTSTEPSEGSAPGSPAGSPTSTEEGTSTEPSEGSAPGTSESAT |
| | PESGPGSEPATSGSETPGTSESATPESGPGSEPATSGSETPGTSESATPESGPGTSTE |
| | PSEGSAPGTSESATPESGPGSPAGSPTSTEEGSPAGSPTSTEEGSPAGSPTSTEEGTS |
| | ESATPESGPGTSTEPSEGSAPGAAEPEA |
| 33 | ASHHHHHHSPAGSPTSTEEGTSESATPESGPGTSTEPSEGSAPGTSESATPESGPGS |
| | EPATSGSETPGTSESATPESGPGSEPATSGSETPGTSESATPESGPGTSTEPSEGSAP |
| | GSPAGSPTSTEEGTSESATPESGPGSEPATSGSETPGTSESATPESGPGSPAGSPTST |
| | EEGSPAGSPTSTEEGTSTEPSEGSAPGTSESATPESGPGTSESATPESGPGTSESATP |
| | ESGPGSEPATSGSETPGSEPATSGSETPGSPAGSPTSTEEGTSTEPSEGSAPGTSTEP |
| | SEGSAPGGSAPGPSGHMGRATSGSETPGTDIQMTQSPSSLSASVGDRVTITCQASQ |
| | DISNYLNWYQQKPGKAPKLLIYDASNLETGVPSRFSGSGSGTDFTFTISSLQPEDIA |
| | TYFCQHFDHLPLAFGGGTKVEIKGATPPETGAETESPGETTGGSAESEPPGEGQV |
| | QLQESGPGLVKPSETLSLTCTVSGGSVSSGDYYWTWIRQSPGKGLEWIGHIYYSG |
| | NTNYNPSLKSRLTISIDTSKTQFSLKLSSVTAADTAIYYCVRDRVTGAFDIWGQGT |
| | MVTVSSGGGGSELVVTQEPSLTVSPGGTVTLTCRSSTGAVTTSNYANWVQQKPG |
| | QAPRGLIGGTNKRAPGTPARFSGSLLGGKAALTLSGVQPEDEAEYYCALWYSNL |
| | WVFGGGTKLTVLGATPPETGAETESPGETTGGSAESEPPGEGEVQLLESGGGLV |
| | QPGGSLKLSCAASGFTFNTYAMNWVRQAPGKGLEWVARIRSKYNNYATYYADS |
| | VKDRFTISRDDSKNTAYLQMNNLKTEDTAVYYCVRHGNFGNSYVSWFAYWGQG |
| | TLVTVSSGTAEAASASGGPSGHMGRPGSPAGSPTSTEEGTSESATPESGPGTSTEPS |
| | EGSAPGSPAGSPTSTEEGTSTEPSEGSAPGTSTEPSEGSAPGTSESATPESGPGSEPA |
| | TSGSETPGSEPATSGSETPGSPAGSPTSTEEGTSESATPESGPGTSTEPSEGSAPGTS |
| | TEPSEGSAPGSPAGSPTSTEEGTSTEPSEGSAPGTSTEPSEGSAPGTSESATPESGPG |
| | TSTEPSEGSAPGTSESATPESGPGSEPATSGSETPGTSTEPSEGSAPGTSTEPSEGSA |
| | PGTSESATPESGPGTSESATPESGPGSPAGSPTSTEEGTSESATPESGPGSEPATSGS |
| | ETPGTSESATPESGPGTSTEPSEGSAPGTSTEPSEGSAPGTSTEPSEGSAPGTSTEPS |
| | EGSAPGTSTEPSEGSAPGTSTEPSEGSAPGSPAGSPTSTEEGTSTEPSEGSAPGTSES |
| | ATPESGPGSEPATSGSETPGTSESATPESGPGSEPATSGSETPGTSESATPESGPGTS |
| | TEPSEGSAPGTSESATPESGPGSPAGSPTSTEEGSPAGSPTSTEEGSPAGSPTSTEEG |
| | TSESATPESGPGTSTEPSEGSAPGAAEPEA |
| 34 | ASHHHHHHSPAGSPTSTEEGTSESATPESGPGTSTEPSEGSAPGTSESATPESGPGS |
| | EPATSGSETPGTSESATPESGPGSEPATSGSETPGTSESATPESGPGTSTEPSEGSAP |
| | GSPAGSPTSTEEGTSESATPESGPGSEPATSGSETPGTSESATPESGPGSPAGSPTST |
| | EEGSPAGSPTSTEEGTSTEPSEGSAPGTSESATPESGPGTSESATPESGPGTSESATP |
| | ESGPGSEPATSGSETPGSEPATSGSETPGSPAGSPTSTEEGTSTEPSEGSAPGTSTEP |
| | SEGSAPGGSAPGVRGLTGPATSGSETPGTDIQMTQSPSSLSASVGDRVTITCQASQ |
| | DISNYLNWYQQKPGKAPKLLIYDASNLETGVPSRFSGSGSGTDFTFTISSLQPEDIA |
| | TYFCQHFDHLPLAFGGGTKVEIKGATPPETGAETESPGETTGGSAESEPPGEGQV |
| | QLQESGPGLVKPSETLSLTCTVSGGSVSSGDYYWTWIRQSPGKGLEWIGHIYYSG |
| | NTNYNPSLKSRLTISIDTSKTQFSLKLSSVTAADTAIYYCVRDRVTGAFDIWGQGT |
| | MVTVSSGGGGSELVVTQEPSLTVSPGGTVTLTCRSSTGAVTTSNYANWVQQKPG |
| | QAPRGLIGGTNKRAPGTPARFSGSLLGGKAALTLSGVQPEDEAEYYCALWYSNL |
| | WVFGGGTKLTVLGATPPETGAETESPGETTGGSAESEPPGEGEVQLLESGGGLV |
| | QPGGSLKLSCAASGFTFNTYAMNWVRQAPGKGLEWVARIRSKYNNYATYYADS |
| | VKDRFTISRDDSKNTAYLQMNNLKTEDTAVYYCVRHGNFGNSYVSWFAYWGQG |
| | TLVTVSSGTAEAASASGGVRGLTGPPGSPAGSPTSTEEGTSESATPESGPGTSTEPS |
| | EGSAPGSPAGSPTSTEEGTSTEPSEGSAPGTSTEPSEGSAPGTSESATPESGPGSEPA |
| | TSGSETPGSEPATSGSETPGSPAGSPTSTEEGTSESATPESGPGTSTEPSEGSAPGTS |
| | TEPSEGSAPGSPAGSPTSTEEGTSTEPSEGSAPGTSTEPSEGSAPGTSESATPESGPG |
| | TSTEPSEGSAPGTSESATPESGPGSEPATSGSETPGTSTEPSEGSAPGTSTEPSEGSA |
| | PGTSESATPESGPGTSESATPESGPGSPAGSPTSTEEGTSESATPESGPGSEPATSGS |
| | ETPGTSESATPESGPGTSTEPSEGSAPGTSTEPSEGSAPGTSTEPSEGSAPGTSTEPS |
| | EGSAPGTSTEPSEGSAPGTSTEPSEGSAPGSPAGSPTSTEEGTSTEPSEGSAPGTSES |
| | ATPESGPGSEPATSGSETPGTSESATPESGPGSEPATSGSETPGTSESATPESGPGTS |
| | TEPSEGSAPGTSESATPESGPGSPAGSPTSTEEGSPAGSPTSTEEGSPAGSPTSTEEG |
| | TSESATPESGPGTSTEPSEGSAPGAAEPEA |
| 35 | ASHHHHHHSPAGSPTSTEEGTSESATPESGPGTSTEPSEGSAPGTSESATPESGPGS |
| | EPATSGSETPGTSESATPESGPGSEPATSGSETPGTSESATPESGPGTSTEPSEGSAP |
| | GSPAGSPTSTEEGTSESATPESGPGSEPATSGSETPGTSESATPESGPGSPAGSPTST |
| | EEGSPAGSPTSTEEGTSTEPSEGSAPGTSESATPESGPGTSESATPESGPGTSESATP |
| | ESGPGSEPATSGSETPGSEPATSGSETPGSPAGSPTSTEEGTSTEPSEGSAPGTSTEP |
| | SEGSAPGGSAPHPVELLARATSGSETPGTDIQMTQSPSSLSASVGDRVTITCKASQ |
| | DVSIGVAWYQQKPGKAPKLLIYSASYRYTGVPSRFSGSGSGTDFTLTISSLQPEDF |
| | ATYYCQQYYTYPYTFGQGTKVEIKGATPPETGAETESPGETTGGSAESEPPGEGE |
| | VQLVESGGGLVQPGGSLRLSCAASGFTFTDYTMDWVRQAPGKGLEWVADVNPN |
| | SGGSIYNQRFKGRFTLSVDRSKNTLYLQMNSLRAEDTAVYYCARNLGPSFYFDY |
| | WGQGTLVTVSSGGGGSELVVTQEPSLTVSPGGTVTLTCRSSNGAVTSSNYANWV |
| | QQKPGQAPRGLIGGTNKRAPGTPARFSGSLLGGKAALTLSGVQPEDEAVYYCAL |
| | WYPNLWVFGGGTKLTVLGATPPETGAETESPGETTGGSAESEPPGEGEVQLLES |
| | GGGIVQPGGSLKLSCAASGFTFNTYAMNWVRQAPGKGLEWVARIRSKYNNYAT |
| | YYADSVKDRFTISRDDSKNTVYLQMNNLKTEDTAVYYCVRHENFGNSYVSWFAH |
| | WGQGTLVTVSSGTAEAASASGHPVELLARPGSPAGSPTSTEEGTSESATPESGPGT |
| | STEPSEGSAPGSPAGSPTSTEEGTSTEPSEGSAPGTSTEPSEGSAPGTSESATPESGP |
| | GSEPATSGSETPGSEPATSGSETPGSPAGSPTSTEEGTSESATPESGPGTSTEPSEGS |
| | APGTSTEPSEGSAPGSPAGSPTSTEEGTSTEPSEGSAPGTSTEPSEGSAPGTSESATP |
| | ESGPGTSTEPSEGSAPGTSESATPESGPGSEPATSGSETPGTSTEPSEGSAPGTSTEP |
| | SEGSAPGTSESATPESGPGTSESATPESGPGSPAGSPTSTEEGTSESATPESGPGSEP |
| | ATSGSETPGTSESATPESGPGTSTEPSEGSAPGTSTEPSEGSAPGTSTEPSEGSAPGT |
| | STEPSEGSAPGTSTEPSEGSAPGTSTEPSEGSAPGSPAGSPTSTEEGTSTEPSEGSAP |
| | GTSESATPESGPGSEPATSGSETPGTSESATPESGPGSEPATSGSETPGTSESATPES |
| | GPGTSTEPSEGSAPGTSESATPESGPGSPAGSPTSTEEGSPAGSPTSTEEGSPAGSPT |
| | STEEGTSESATPESGPGTSTEPSEGSAPGAAEPEA |

### Target Tissues or Cells

[0392] In some embodiments of the compositions (such as the therapeutic agents, or activatable therapeutic agents described hereinabove) or methods described herein, the target tissue or cell can contain therein or thereon, or can be associated with in proximity thereto, a reporter polypeptide (such as one described herein this TARGET TISSUES OR CELLS section) capable of being cleaved by a mammalian protease at a cleavage sequence (such as one set forth in Table A). The reporter polypeptide can be a polypeptide set forth in the “Report Protein” column of Table A (or any subset thereof). In some embodiments, the reporter polypeptide can be selected from coagulation factor, complement component, tubulin, immunoglobulin, apolipoprotein, serum amyloid, insulin, growth factor, fibrinogen, PDZ domain protein, LIM domain protein, c-reactive protein, serum albumin, versican, collagen, elastin, keratin, kininogen-1, alpha-2-antiplasmin, clusterin, biglycan, alpha-1-antitrypsin, transthyretin, alpha-1-antichymotrypsin, glucagon, hepcidin, thymosin beta-4, haptoglobin, hemoglobin subunit alpha, caveolae-associated protein 2, alpha-2-HS-glycoprotein, chromogranin-A, vitronectin, hemopexin, epididymis secretory sperm binding protein, secretogranin-2, angiotensinogen, transgelin-2, pancreatic prohormone, neurosecretory protein VGF, ceruloplasmin, PDZ and LIM domain protein 1, multimerin-1, inter-alpha-trypsin inhibitor heavy chain H2, N-acetylmuramoyl-L-alanine amidase, histone H1.4, adhesion G-protein coupled receptor G6, mannan-binding lectin serine protease 2, prothrombin, deleted in malignant brain tumors 1 protein, desmoglein-3, calsyntenin-1, alpha-2-macroglobulin, myosin-9, sodium/potassium-transporting ATPase subunit gamma, oncoprotein-induced transcript 3 protein, serglycin, histidine-rich glycoprotein, inter-alpha-trypsin inhibitor heavy chain H5, integrin alpha-IIb, membrane-associated progesterone receptor component 1, histone H1.2, rho GDP-dissociation inhibitor 2, zinc-alpha-2-glycoprotein, talin-1, secretogranin-1, neutrophil defensin 3, cytochrome P450 2E1, gastric inhibitory polypeptide, transcription initiation factor TFIID subunit 1, integral membrane protein 2B, pigment epithelium-derived factor, voltage-dependent N-type calcium channel subunit alpha-1B, ras GTPase-activating protein nGAP, type I cytoskeletal 17, sulfhydryl oxidase 1, homeobox protein Hox-B2, transcription factor SOX-10, E3 ubiquitin-protein ligase SIAH2, decorin, secreted protein acidic and rich in cysteine (SPARC), laminin gamma 1 chain, vimentin, and nidogen-1 (NID1). In some embodiments, the reporter polypeptide can be selected from collagen, elastin, keratin, coagulation factor, complement component, tubulin, immunoglobulin, apolipoprotein, serum amyloid, insulin, growth factor, fibrinogen, PDZ domain protein, LIM domain protein, c-reactive protein, and serum albumin. The collagen can comprise alpha chain(s) (such as alpha-1, alpha-2, alpha-3, or a combination thereof) of collagen type I, collagen type II, collagen type III, collagen type IV, collagen type V, collagen type VI, collagen type VII, collagen type VIII, collagen type IX, collagen type X, collagen type XI, collagen type XII, collagen type XIII, collagen type XIV, collagen type XV, collagen type XVI, collagen type XVII, collagen type XVIII, collagen type XIX, collagen type XX, collagen type XXI, collagen type XXII, collagen type XXIII, collagen type XXIV, collagen type XXV, collagen type XXVI, collagen type XXVII, collagen type XXVIII, collagen type XXIX, or a combination thereof. The coagulation factor can be selected from coagulation factor IX, coagulation factor XII, and coagulation factor XIII A chain. The complement component can be selected from C1 (for example, and not limited to, complement C1r subcomponent-like protein, complement C1r subcomponent), C3, C4 (for example, and not limited to, complement C4-A, complement C4-B), and C5. The tubulin can be selected from tubulin alpha chain (for example, and not limited to, tubulin alpha-4A chain), and tubulin beta chain. The immunoglobulin can be selected from immunoglobulin lambda variable 3-21, immunoglobulin lambda variable 3-25, immunoglobulin lambda variable 1-51, immunoglobulin lambda variable 1-36, immunoglobulin kappa variable 3-20, immunoglobulin kappa variable 2-30, probable non-functional immunoglobulin kappa variable 2D-24, immunoglobulin lambda constant 3, immunoglobulin kappa variable 2-28, immunoglobulin kappa variable 3-11, immunoglobulin kappa variable 1-39, immunoglobulin lambda variable 6-57, immunoglobulin kappa variable 3-15, immunoglobulin lambda variable 2-18, immunoglobulin heavy variable 3-15, immunoglobulin lambda variable 2-11, immunoglobulin lambda variable 3-27, and immunoglobulin kappa variable 4-1. The apolipoprotein can be selected from apolipoprotein A-I, apolipoprotein A-I Isoform 1, apolipoprotein apolipoprotein C-I, apolipoprotein A-II, and apolipoprotein L1. The serum amyloid protein can be selected from serum amyloid A-1 protein, and serum amyloid A-2 protein. The growth factor can be selected from insulin-like growth factor II, latent-transforming growth factor beta-binding protein 2, and latent-transforming growth factor beta-binding protein 4. The fibrinogen can be selected from fibrinogen alpha chain, fibrinogen beta chain, and fibrinogen gamma chain. The LIM domain protein can be zyxin. In some embodiments, the reporter polypeptide can be selected from the group consisting of versican, type II collagen alpha-1 chain, kininogen-1, complement C4-A, complement C4-B, complement C3, alpha-2-antiplasmin, clusterin, biglycan, elastin, fibrinogen alpha chain, alpha-1-antitrypsin, fibrinogen beta chain, type III collagen alpha-1 chain, serum amyloid A-1 protein, transthyretin, apolipoprotein A-I, apolipoprotein A-I Isoform 1, alpha-1-antichymotrypsin, glucagon, hepcidin, serum amyloid A-2 protein, thymosin beta-4, haptoglobin, hemoglobin subunit alpha, caveolae-associated protein 2, alpha-2-HS-glycoprotein, chromogranin-A, vitronectin, hemopexin, epididymis secretory sperm binding protein, zyxin, apolipoprotein secretogranin-2, angiotensinogen, c-reactive protein, serum albumin, transgelin-2, pancreatic prohormone, neurosecretory protein VGF, ceruloplasmin, PDZ and LIM domain protein 1, tubulin alpha-4A chain, multimerin-1, inter-alpha-trypsin inhibitor heavy chain H2, apolipoprotein C-I, fibrinogen gamma chain, N-acetylmuramoyl-L-alanine amidase, immunoglobulin lambda variable 3-21, histone H1.4, adhesion G-protein coupled receptor G6, immunoglobulin lambda variable 3-25, immunoglobulin lambda variable 1-51, immunoglobulin lambda variable 1-36, mannan-binding lectin serine protease 2, immunoglobulin kappa variable 3-20, immunoglobulin kappa variable 2-30, insulin-like growth factor II, apolipoprotein A-II, probable non-functional immunoglobulin kappa variable 2D-24, prothrombin, coagulation factor IX, apolipoprotein L1, deleted in malignant brain tumors 1 protein, desmoglein-3, calsyntenin-1, immunoglobulin lambda constant 3, complement C5, alpha-2-macroglobulin, myosin-9, sodium/potassium-transporting ATPase subunit gamma, immunoglobulin kappa variable 2-28, oncoprotein-induced transcript 3 protein, serglycin, coagulation factor XII, coagulation factor XIII A chain, insulin, histidine-rich glycoprotein, immunoglobulin kappa variable 3-11, immunoglobulin kappa variable 1-39, collagen alpha-1(I) chain, inter-alpha-trypsin inhibitor heavy chain H5, latent-transforming growth factor beta-binding protein 2, integrin alpha-IIb, membrane-associated progesterone receptor component 1, immunoglobulin lambda variable 6-57, immunoglobulin kappa variable 3-15, complement C1r subcomponent-like protein, histone H1.2, rho GDP-dissociation inhibitor 2, latent-transforming growth factor beta-binding protein 4, collagen alpha-1(XVIII) chain, immunoglobulin lambda variable 2-18, zinc-alpha-2-glycoprotein, talin-1, secretogranin-1, neutrophil defensin 3, cytochrome P450 2E1, gastric inhibitory polypeptide, immunoglobulin heavy variable 3-15, immunoglobulin lambda variable 2-11, transcription initiation factor TFIID subunit 1, collagen alpha-1(VII) chain, integral membrane protein 2B, pigment epithelium-derived factor, voltage-dependent N-type calcium channel subunit alpha-1B, immunoglobulin lambda variable 3-27, ras GTPase-activating protein nGAP, keratin, type I cytoskeletal 17, tubulin beta chain, sulfhydryl oxidase 1, immunoglobulin kappa variable 4-1, complement C1r subcomponent, homeobox protein Hox-B2, transcription factor SOX-10, E3 ubiquitin-protein ligase SIAH2, decorin, SPARC, type I collagen alpha-1 chain, type IV collagen alpha-1 chain, laminin gamma 1 chain, vimentin, type III collagen, type IV collagen alpha-3 chain, type VII collagen alpha-1 chain, type VI collagen alpha-1 chain, type V collagen alpha-1 chain, nidogen-1, and type VI collagen alpha-3 chain. In some embodiments, the reporter polypeptide can comprise a cleavage sequence set forth in Column II or III of Table A (or a subset thereof) and/or the group set forth in Tables 1(a)-1(j) (or any subset thereof). The reporter polypeptide can comprise a sequence set forth in Column IV of Table A (or a subset thereof). The reporter polypeptide can comprise a sequence set forth in Column V of Table A (or a subset thereof). The reporter polypeptide can comprise a sequence set forth in Column VI of Table A (or a subset thereof). The reporter polypeptide can comprise a peptide biomarker (or a peptide biomarker sequence) (such as one shown in Table A) capable of being identified from a biological sample of the subject. The peptide biomarker can comprise a sequence set forth in Column IV of Table A (or a subset thereof). The peptide biomarker can comprise a sequence set forth in Column V of Table A (or a subset thereof). The peptide biomarker can comprise a sequence set forth in Column VI of Table A (or a subset thereof). In some embodiments, the reporter polypeptide is selected from the group set forth in Column I of Table A (or a subset thereof). In some embodiments, the cleavage sequence of the reporter polypeptide does not comprise a methionine residue immediately N-terminal to a scissile bond (contained therein), when the methionine is the first residue at N terminus of the reporter polypeptide.

TABLE A
Exemplary cleavage sequences and biomarker sequences in exemplary
reporter polypeptides

| | | Column II | | Column III | | | | | | | |
|---|---|---|---|---|---|---|---|---|---|---|---|
| | | | Clea- | | Clea- | | | | | | |
| | Column I | | vage | | vage | Column IV | | Column V | | Column VI | |
| | Reporter | SEQ | Se- | SEQ | Se- | SEQ | N- | SEQ | | SEQ | C- |
| | Poly- | ID | quence | ID | quence | ID | terminal | ID | Center | ID | terminal |
| # | peptide | NO: | 1* | NO: | 2 | NO: | Fragment | NO: | Fragment | NO: | Fragment |
| 1 | type III | 755 | GPPG- | | N/A | 1688 | GGPGPQGPPG | | N/A | 2598 | KNGETGPQGP |
| | collagen | | KNGE | | | | | | | | |
| | alpha-1 | | | | | | | | | | |
| | chain | | | | | | | | | | |
| 2 | versican | 756 | VENA- | | N/A | 1689 | CGQPPVVENA | | N/A | 2599 | KTFGKMKPRY |
| | | | KTFG | | | | | | | | |
| 3 | type II | 757 | GAAG- | | N/A | 1690 | GPPGRDGAAG | | N/A | 2600 | VKGDRGETGA |
| | collagen | | VKGD | | | | | | | | |
| | alpha-1 | | | | | | | | | | |
| | chain | | | | | | | | | | |
| 4 | kininogen- | 758 | SLMK- | 1291 | FSPF- | 1691 | QPLGMISLMK | 2199 | RPPGFSPF | 2601 | RSSRIGEIKE |
| | 1 | | RPPG | | RSSR | | | | | | |
| 5 | complement | 759 | NGFK- | 1292 | LNNR- | 1692 | LSSTGRNGFK | 2200 | SHALQLNNR | 2602 | QIRGLEEELQ |
| | C4-A OR | | SHAL | | QIRG | | | | | | |
| | complement | | | | | | | | | | |
| | C4-B | | | | | | | | | | |
| 6 | kininogen- | 760 | SLMK- | 1293 | SPFR- | 1693 | QPLGMISLMK | 2201 | RPPGFSPFR | 2603 | SSRIGEIKEE |
| | 1 | | RPPG | | SSRI | | | | | | |
| 7 | complement | 761 | THRI- | 1294 | SLLR- | 1694 | SRSSKITHRI | 2202 | HWESASLLR | 2604 | SEETKENEGF |
| | C3 | | HWES | | SEET | | | | | | |
| 8 | complement | 762 | SSKI- | 1295 | WESA- | 1695 | LQLPSRSSKI | 2203 | THRIHWESA | 2605 | SLLRSEETKE |
| | C3 | | THRI | | SLLR | | | | | | |
| 9 | complement | 763 | KSHA- | 1296 | RQIR- | 1696 | TGRNGFKSHA | 2204 | LQLNNRQIR | 2606 | GLEEELQFSL |
| | C4-A OR | | LQLN | | GLEE | | | | | | |
| | complement | | | | | | | | | | |
| | C4-B | | | | | | | | | | |
| 10 | complement | 764 | ITHR- | 1297 | SLLR- | 1697 | PSRSSKITHR | 2205 | IHWESASLLR | 2607 | SEETKENEGF |
| | C3 | | IHWE | | SEET | | | | | | |
| 11 | complement | 765 | FKSH- | 1298 | RQIR- | 1698 | STGRNGFKSH | 2206 | ALQLNNRQIR | 2608 | GLEEELQFSL |
| | C4-A OR | | ALQL | | GLEE | | | | | | |
| | complement | | | | | | | | | | |
| | C4-B | | | | | | | | | | |
| 12 | complement | 766 | RSSK- | 1299 | WESA- | 1699 | SLQLPSRSSK | 2207 | ITHRIHWESA | 2609 | SLLRSEETKE |
| | C3 | | ITHR | | SLLR | | | | | | |
| 13 | alpha-2- | 767 | PVSA- | 1300 | TSGP- | 1700 | PCSVFSPVSA | 2208 | MEPLGRQLTSGP | 2610 | NQEQVSPLTL |
| | anti- | | MEPL | | NQEQ | | | | | | |
| | plasmin | | | | | | | | | | |
| 14 | kininogen- | 768 | GHTR- | 1301 | EKQR- | 1701 | DSGKEQGHTR | 2209 | RHDWGHEKQR | 2611 | KHNLGHGHKH |
| | 1 | | RHDW | | KHNL | | | | | | |
| 15 | complement | 769 | KITH- | 1302 | SLLR- | 1702 | LPSRSSKITH | 2210 | RIHWESASLLR | 2612 | SEETKENEGF |
| | C3 | | RIHW | | SEET | | | | | | |
| 16 | complement | 770 | SRSS- | 1303 | WESA- | 1703 | VSLQLPSRSS | 2211 | KITHRIHWESA | 2613 | SLLRSEETKE |
| | C3 | | KITH | | SLLR | | | | | | |
| 17 | complement | 771 | RQIR- | 1304 | LGSK- | 1704 | ALQLNNRQIR | 2212 | GLEEELQFSLGS | 2614 | INVKVGGNSK |
| | C4-A OR | | GLEE | | INVK | | | | K | | |
| | complement | | | | | | | | | | |
| | C4-B | | | | | | | | | | |
| 18 | complement | 772 | NGFK- | 1305 | RQIR- | 1705 | LSSTGRNGFK | 2213 | SHALQLNNRQIR | 2615 | GLEEELQFSL |
| | C4-A OR | | SHAL | | GLEE | | | | | | |
| | complement | | | | | | | | | | |
| | C4-B | | | | | | | | | | |
| 19 | complement | 773 | PSRS- | 1306 | WESA- | 1706 | DVSLQLPSRS | 2214 | SKITHRIHWESA | 2616 | SLLRSEETKE |
| | C3 | | SKIT | | SLLR | | | | | | |
| 20 | complement | 774 | STGR- | 1307 | LNNR- | 1707 | LNVTLSSTGR | 2215 | NGFKSHALQLNN | 2617 | QIRGLEEELQ |
| | C4-A OR | | NGFK | | QIRG | | | | R | | |
| | complement | | | | | | | | | | |
| | C4-B | | | | | | | | | | |
| 21 | clusterin | 775 | LPHR- | 1308 | SRIV- | 1708 | HYLPFSLPHR | 2216 | RPHFFFPKSRIV | 2618 | RSLMPFSPYE |
| | | | RPHF | | RSLM | | | | | | |
| 22 | biglycan | 776 | NNPVP- | | N/A | 1709 | GISLENNPVP | | N/A | 2619 | YWEVQPATFR |
| | | | YWEVQ | | | | | | | | |
| 23 | elastin | 777 | GLPYT- | | N/A | 1710 | LPGGYGLPYT | | N/A | 2620 | TGKLPYGYGP |
| | | | TGKLP | | | | | | | | |
| 24 | elastin | 778 | ARPGF- | | N/A | 1711 | LGGVAARPGF | | N/A | 2621 | GLSPIFPGGA |
| | | | GLSPI | | | | | | | | |
| 25 | fibrinogen | 779 | SRGK- | 1309 | ESKS- | 1712 | GIAEFPSRGK | 2217 | SSSYSKQFTSST | 2622 | YKMADEAGSE |
| | alpha | | SSSY | | YKMA | | | | SYNRGDSTFESK | | |
| | chain | | | | | | | | S | | |
| 26 | fibrinogen | 780 | SRGK- | 1310 | SKSY- | 1713 | GIAEFPSRGK | 2218 | SSSYSKQFTSST | 2623 | KMADEAGSEA |
| | alpha | | SSSY | | KMAD | | | | SYNRGDSTFESK | | |
| | chain | | | | | | | | SY | | |
| 27 | fibrinogen | 781 | DGFR- | 1311 | PSRG- | 1714 | SGIGTLDGFR | 2219 | HRHPDEAAFFDT | 2624 | KSSSYSKQFT |
| | alpha | | HRHP | | KSSS | | | | ASTGKTFPGFFS | | |
| | chain | | | | | | | | PMLGEFVSETES | | |
| | | | | | | | | | RGSESGIFTNTK | | |
| | | | | | | | | | ESSSHHPGIAEF | | |
| | | | | | | | | | PSRG | | |
| 28 | fibrinogen | 782 | SRGK- | 1312 | SYKM- | 1715 | GIAEFPSRGK | 2220 | SSSYSKQFTSST | 2625 | ADEAGSEADH |
| | alpha | | SSSY | | ADEA | | | | SYNRGDSTFESK | | |
| | chain | | | | | | | | SYKM | | |
| 29 | fibrinogen | 783 | TAWT- | 1313 | GGVR- | 1716 | VLSVVGTAWT | 2221 | ADSGEGDFLAEG | 2626 | GPRVVERHQS |
| | alpha | | ADSG | | GPRV | | | | GGVR | | |
| | chain | | | | | | | | | | |
| 30 | fibrinogen | 784 | AWTA- | 1314 | GGVR- | 1717 | LSVVGTAWTA | 2222 | DSGEGDFLAEGG | 2627 | GPRVVERHQS |
| | alpha | | DSGE | | GPRV | | | | GVR | | |
| | chain | | | | | | | | | | |
| 31 | fibrinogen | 785 | AWTA- | 1315 | GGGV- | 1718 | LSVVGTAWTA | 2223 | DSGEGDFLAEGG | 2628 | RGPRVVERHQ |
| | alpha | | DSGE | | RGPR | | | | GV | | |
| | chain | | | | | | | | | | |
| 32 | fibrinogen | 786 | KNNK- | 1316 | ANNR- | 1719 | SLFEYQKNNK | 2224 | DSHSLTTNIMEI | 2629 | DNTYNRVSED |
| | alpha | | DSHS | | DNTY | | | | LRGDFSSANNR | | |
| | chain | | | | | | | | | | |
| 33 | fibrinogen | 787 | WTAD- | 788 | GGVR- | 1720 | SVVGTAWTAD | 2225 | SGEGDFLAEGGG | 2630 | GPRVVERHQS |
| | alpha | | SGEG | | GPRV | | | | VR | | |
| | chain | | | | | | | | | | |
| 34 | fibrinogen | 789 | SRGK- | 1317 | YKMA- | 1721 | GIAEFPSRGK | 2226 | SSSYSKQFTSST | 2631 | DEAGSEADHE |
| | alpha | | SSSY | | DEAG | | | | SYNRGDSTFESK | | |
| | chain | | | | | | | | SYKMA | | |
| 35 | fibrinogen | 790 | TAWT- | 1318 | GGGV- | 1722 | VLSVVGTAWT | 2227 | ADSGEGDFLAEG | 2632 | RGPRVVERHQ |
| | alpha | | ADSG | | RGPR | | | | GGV | | |
| | chain | | | | | | | | | | |
| 36 | fibrinogen | 791 | GNFK- | 1319 | MRME- | 1723 | VPDLVPGNFK | 2228 | SQLQKVPPEWKA | 2633 | LERPGGNEIT |
| | alpha | | SQLQ | | LERP | | | | LTDMPQMRME | | |
| | chain | | | | | | | | | | |
| 37 | fibrinogen | 792 | TADS- | 1320 | GGVR- | 1724 | VVGTAWTADS | 2229 | GEGDFLAEGGGV | 2634 | GPRVVERHQS |
| | alpha | | GEGD | | GPRV | | | | R | | |
| | chain | | | | | | | | | | |
| 38 | fibrinogen | 793 | SSGP- | 1321 | SSGP- | 1725 | GSWNSGSSGP | 2230 | GSTGNRNPGSSG | 2635 | GSTGSWNSGS |
| | alpha | | GSTG | | GSTG | | | | TGGTATWKPGSS | | |
| | chain | | | | | | | | GP | | |
| 39 | fibrinogen | 794 | ADSG- | 1322 | GGVR- | 1726 | VGTAWTADSG | 2231 | EGDFLAEGGGVR | 2636 | GPRVVERHQS |
| | alpha | | EGDF | | GPRV | | | | | | |
| | chain | | | | | | | | | | |
| 40 | fibrinogen | 795 | SRGK- | 1323 | YKMA- | 1727 | GIAEFPSRGK | 2232 | SSSYSKQFTSST | 2637 | DEAGSEADHE |
| | alpha | | SSSY | | DEAG | | | | SYNRGDSTFESK | | |
| | chain | | | | | | | | SYKMA | | |
| 41 | fibrinogen | 796 | SRGK- | 1324 | TFES- | 1728 | GIAEFPSRGK | 2233 | SSSYSKQFTSST | 2638 | KSYKMADEAG |
| | alpha | | SSSY | | KSYK | | | | SYNRGDSTFES | | |
| | chain | | | | | | | | | | |
| 42 | fibrinogen | 797 | TAWT- | 1325 | PRVV- | 1729 | VLSVVGTAWT | 2234 | ADSGEGDFLAEG | 2639 | ERHQSACKDS |
| | alpha | | ADSG | | ERHQ | | | | GGVRGPRVV | | |
| | chain | | | | | | | | | | |
| 43 | fibrinogen | 798 | NFKS- | 1326 | PEWK- | 1730 | PDLVPGNFKS | 2235 | QLQKVPPEWK | 2640 | ALTDMPQMRM |
| | alpha | | QLQK | | ALTD | | | | | | |
| | chain | | | | | | | | | | |
| 44 | fibrinogen | 799 | KMKP- | 1327 | GNFK- | 1731 | QHLPLIKMKP | 2236 | VPDLVPGNFK | 2641 | SQLQKVPPEW |
| | alpha | | VPDL | | SQLQ | | | | | | |
| | chain | | | | | | | | | | |
| 45 | fibrinogen | 800 | SGEG- | 1328 | GGVR- | 1732 | TAWTADSGEG | 2237 | DFLAEGGGVR | 2642 | GPRVVERHQS |
| | alpha | | DFLA | | GPRV | | | | | | |
| | chain | | | | | | | | | | |
| 46 | fibrinogen | 801 | TAWT- | 1329 | GPRV- | 1733 | VLSVVGTAWT | 2238 | ADSGEGDFLAEG | 2643 | VERHQSACKD |
| | alpha | | ADSG | | VERH | | | | GGVRGPRV | | |
| | chain | | | | | | | | | | |
| 47 | fibrinogen | 802 | STGK- | 1330 | PSRG- | 1734 | AFFDTASTGK | 2239 | TFPGFFSPMLGE | 2644 | KSSSYSKQFT |
| | alpha | | TFPG | | KSSS | | | | FVSETESRGSES | | |
| | chain | | | | | | | | GIFTNTKESSSH | | |
| | | | | | | | | | HPGIAEFPSRG | | |
| 48 | fibrinogen | 803 | PLIK- | 1331 | GNFK- | 1735 | RDRQHLPLIK | 2240 | MKPVPDLVPGNF | 2645 | SQLQKVPPEW |
| | alpha | | MKPV | | SQLQ | | | | K | | |
| | chain | | | | | | | | | | |
| 49 | fibrinogen | 804 | PLIK- | 1332 | SQLQ- | 1736 | RDRQHLPLIK | 2241 | MKPVPDLVPGNF | 2646 | KVPPEWKALT |
| | alpha | | MKPV | | KVPP | | | | KSQLQ | | |
| | chain | | | | | | | | | | |
| 50 | fibrinogen | 805 | GSWN- | 1333 | SSGP- | 1737 | RNPSSAGSWN | 2242 | SGSSGPGSTGNR | 2647 | GSTGSWNSGS |
| | alpha | | SGSS | | GSTG | | | | NPGSSGTGGTAT | | |
| | chain | | | | | | | | WKPGSSGP | | |
| 51 | fibrinogen | 806 | PLIK- | 1334 | MRME- | 1738 | RDRQHLPLIK | 2243 | MKPVPDLVPGNF | 2648 | LERPGGNEIT |
| | alpha | | MKPV | | LERP | | | | KSQLQKVPPEWK | | |
| | chain | | | | | | | | ALTDMPQMRME | | |
| 52 | fibrinogen | 807 | GEFV- | 1335 | PSRG- | 1739 | FFSPMLGEFV | 2244 | SETESRGSESGI | 2649 | KSSSYSKQFT |
| | alpha | | SETE | | KSSS | | | | FTNTKESSSHHP | | |
| | chain | | | | | | | | GIAEFPSRG | | |
| 53 | fibrinogen | 808 | AWTA- | 1336 | PRVV- | 1740 | LSVVGTAWTA | 2245 | DSGEGDFLAEGG | 2650 | ERHQSACKDS |
| | alpha | | DSGE | | ERHQ | | | | GVRGPRVV | | |
| | chain | | | | | | | | | | |
| 54 | fibrinogen | 809 | KNNK- | 1337 | SANN- | 1741 | SLFEYQKNNK | 2246 | DSHSLTTNIMEI | 2651 | RDNTYNRVSE |
| | alpha | | DSHS | | RDNT | | | | LRGDFSSANN | | |
| | chain | | | | | | | | | | |
| 55 | fibrinogen | 810 | TAWT- | 1338 | RVVE- | 1742 | VLSVVGTAWT | 2247 | ADSGEGDFLAEG | 2652 | RHQSACKDSD |
| | alpha | | ADSG | | RHQS | | | | GGVRGPRVVE | | |
| | chain | | | | | | | | | | |
| 56 | fibrinogen | 811 | PLIK- | 1339 | KALT- | 1743 | RDRQHLPLIK | 2248 | MKPVPDLVPGNF | 2653 | DMPQMRMELE |
| | alpha | | MKPV | | DMPQ | | | | KSQLQKVPPEWK | | |
| | chain | | | | | | | | ALT | | |
| 57 | fibrinogen | 812 | GQWH- | 1340 | WGTF- | 1744 | SVSGSTGQWH | 2249 | SESGSFRPDSPG | 2654 | EEVSGNVSPG |
| | alpha | | SESG | | EEVS | | | | SGNARPNNPDWG | | |
| | chain | | | | | | | | TF | | |
| 58 | fibrinogen | 813 | KMKP- | 1341 | PGNF- | 1745 | QHLPLIKMKP | 2250 | VPDLVPGNF | 2655 | KSQLQKVPPE |
| | alpha | | VPDL | | KSQL | | | | | | |
| | chain | | | | | | | | | | |
| 59 | fibrinogen | 814 | MRME- | 1342 | SPRN- | 1746 | LTDMPQMRME | 2251 | LERPGGNEITRG | 2656 | PSSAGSWNSG |
| | alpha | | LERP | | PSSA | | | | GSTSYGTGSETE | | |
| | chain | | | | | | | | SPRN | | |
| 60 | fibrinogen | 815 | KPVP- | 1343 | PGNF- | 1747 | LPLIKMKPVP | 2252 | DLVPGNF | 2657 | KSQLQKVPPE |
| | alpha | | DLVP | | KSQL | | | | | | |
| | chain | | | | | | | | | | |
| 61 | fibrinogen | 816 | PLIK- | 1344 | PQMR- | 1748 | RDRQHLPLIK | 2253 | MKPVPDLVPGNF | 2658 | MELERPGGNE |
| | alpha | | MKPV | | MELE | | | | KSQLQKVPPEWK | | |
| | chain | | | | | | | | ALTDMPQMR | | |
| 62 | fibrinogen | 817 | TAWT- | 1345 | ERHQ- | 1749 | VLSVVGTAWT | 2254 | ADSGEGDFLAEG | 2659 | SACKDSDWPF |
| | alpha | | ADSG | | SACK | | | | GGVRGPRVVERH | | |
| | chain | | | | | | | | Q | | |
| 63 | fibrinogen | 818 | GNFK- | 1346 | KALT- | 1750 | VPDLVPGNFK | 2255 | SQLQKVPPEWKA | 2660 | DMPQMRMELE |
| | alpha | | SQLQ | | DMPQ | | | | LT | | |
| | chain | | | | | | | | | | |
| 64 | fibrinogen | 819 | RGKS- | 1347 | TFES- | 1751 | IAEFPSRGKS | 2256 | SSYSKQFTSSTS | 2661 | KSYKMADEAG |
| | alpha | | SSYS | | KSYK | | | | YNRGDSTFES | | |
| | chain | | | | | | | | | | |
| 65 | fibrinogen | 820 | MLGE- | 1348 | PSRG- | 1752 | PGFFSPMLGE | 2257 | FVSETESRGSES | 2662 | KSSSYSKQFT |
| | alpha | | FVSE | | KSSS | | | | GIFTNTKESSSH | | |
| | chain | | | | | | | | HPGIAEFPSRG | | |
| 66 | fibrinogen | 821 | MRME- | 1349 | GNRN- | 1753 | LTDMPQMRME | 2258 | LERPGGNEITRG | 2663 | PGSSGTGGTA |
| | alpha | | LERP | | PGSS | | | | GSTSYGTGSETE | | |
| | chain | | | | | | | | SPRNPSSAGSWN | | |
| | | | | | | | | | SGSSGPGSTGNR | | |
| | | | | | | | | | N | | |
| 67 | fibrinogen | 822 | SYSK- | 1350 | SKSY- | 1754 | SRGKSSSYSK | 2259 | QFTSSTSYNRGD | 2664 | KMADEAGSEA |
| | alpha | | QFTS | | KMAD | | | | STFESKSY | | |
| | chain | | | | | | | | | | |
| 68 | fibrinogen | 823 | ESSV- | 1351 | WGTF- | 1755 | AGHWTSESSV | 2260 | SGSTGQWHSESG | 2665 | EEVSGNVSPG |
| | alpha | | SGST | | EEVS | | | | SFRPDSPGSGNA | | |
| | chain | | | | | | | | RPNNPDWGTF | | |
| 69 | fibrinogen | 824 | DGFR- | 1352 | PSRG- | 1756 | SGIGTLDGFR | 2261 | HRHPDEAAFFDT | 2666 | KSSSYSKQFT |
| | alpha | | HRHP | | KSSS | | | | ASTGKTFPGFFS | | |
| | chain | | | | | | | | PMLGEFVSETES | | |
| | | | | | | | | | RGSESGIFTNTK | | |
| | | | | | | | | | ESSSHHPGIAEF | | |
| | | | | | | | | | PSRG | | |
| 70 | fibrinogen | 825 | PLIK- | 1353 | MELE- | 1757 | RDRQHLPLIK | 2262 | MKPVPDLVPGNF | 2667 | RPGGNEITRG |
| | alpha | | MKPV | | RPGG | | | | KSQLQKVPPEWK | | |
| | chain | | | | | | | | ALTDMPQMRMEL | | |
| | | | | | | | | | E | | |
| 71 | fibrinogen | 826 | WGTF- | 1354 | LVTS- | 1758 | RPNNPDWGTF | 2263 | EEVSGNVSPGTR | 2668 | KGDKELRTGK |
| | alpha | | EEVS | | KGDK | | | | REYHTEKLVTS | | |
| | chain | | | | | | | | | | |
| 72 | fibrinogen | 827 | MRME- | 1355 | GSWN- | 1759 | LTDMPQMRME | 2264 | LERPGGNEITRG | 2669 | SGSSGPGSTG |
| | alpha | | LERP | | SGSS | | | | GSTSYGTGSETE | | |
| | chain | | | | | | | | SPRNPSSAGSWN | | |
| 73 | fibrinogen | 828 | EAAF- | 1356 | TFPG- | 1760 | RHRHPDEAAF | 2265 | FDTASTGKTFPG | 2670 | FFSPMLGEFV |
| | alpha | | FDTA | | FFSP | | | | | | |
| | chain | | | | | | | | | | |
| 74 | fibrinogen | 829 | SRGK- | 1357 | RGHA- | 1761 | GIAEFPSRGK | 2266 | SSSYSKQFTSST | 2671 | KSRPVRDCDD |
| | alpha | | SSSY | | KSRP | | | | SYNRGDSTFESK | | |
| | chain | | | | | | | | SYKMADEAGSEA | | |
| | | | | | | | | | DHEGTHSTKRGH | | |
| | | | | | | | | | A | | |
| 75 | fibrinogen | 830 | PLIK- | 1358 | PGNF- | 1762 | RDRQHLPLIK | 2267 | MKPVPDLVPGNF | 2672 | KSQLQKVPPE |
| | alpha | | MKPV | | KSQL | | | | | | |
| | chain | | | | | | | | | | |
| 76 | alpha-1- | 831 | DPQG- | 1359 | LAHQ- | 1763 | PVSLAEDPQG | 2268 | DAAQKTDTSHHD | 2673 | SNSTNIFFSP |
| | anti- | | DAAQ | | SNST | | | | QDHPTFNKITPN | | |
| | trypsin | | | | | | | | LAEFAFSLYRQL | | |
| | | | | | | | | | AHQ | | |
| 77 | alpha-1- | 832 | FVFL- | | N/A | 1764 | VKFNKPFVFL | | N/A | 2674 | MIEQNTKSPL |
| | anti- | | MIEQ | | (end | | | | | | FMGKVVNPTQ |
| | trypsin | | | | of | | | | | | K |
| | | | | | pro- | | | | | | |
| | | | | | tein) | | | | | | |
| 78 | alpha-1- | 833 | MFLE- | | N/A | 1765 | TEAAGAMFLE | | N/A | 2675 | AIPMSIPPEV |
| | anti- | | AIPM | | (end | | | | | | KFNKPFVFLM |
| | trypsin | | | | of | | | | | | IEQNTKSPLF |
| | | | | | pro- | | | | | | MGKVVNPTQK |
| | | | | | tein) | | | | | | |
| 79 | alpha-1- | 834 | IPMS- | | N/A | 1766 | AMFLEAIPMS | | N/A | 2676 | IPPEVKFNKP |
| | anti- | | IPPE | | (end | | | | | | FVFLMIEQNT |
| | trypsin | | | | of | | | | | | KSPLFMGKV |
| | | | | | pro- | | | | | | VNPTQK |
| | | | | | tein} | | | | | | |
| 80 | alpha-1- | 835 | GTEA- | | N/A | 1767 | LTIDEKGTEA | | N/A | 2677 | AGAMFLEAIP |
| | anti- | | AGAM | | (end | | | | | | MSIPPEVKFN |
| | trypsin | | | | of | | | | | | KPFVFLMIEQ |
| | | | | | pro- | | | | | | NTKSPLFMGK |
| | | | | | tein) | | | | | | VVNPTQK |
| 81 | alpha-1- | 836 | AIPM- | | N/A | 1768 | GAMFLEAIPM | | N/A | 2678 | SIPPEVKFNK |
| | anti- | | SIPP | | (end | | | | | | PFVFLMIEQN |
| | trypsin | | | | of | | | | | | TKSPLFMGKV |
| | | | | | pro- | | | | | | VNPTQK |
| | | | | | tein) | | | | | | |
| 82 | alpha-1- | 837 | PFVF- | | N/A | 1769 | EVKENKPFVF | | N/A | 2679 | LMIEQNTKSP |
| | anti- | | LMIE | | (end | | | | | | LFMGKVVNPT |
| | trypsin | | | | of | | | | | | QK |
| | | | | | pro- | | | | | | |
| | | | | | tein) | | | | | | |
| 83 | alpha-1- | 838 | PEVK- | | N/A | 1770 | IPMSIPPEVK | | N/A | 2680 | FNKPFVFLMI |
| | anti- | | FNKP | | (end | | | | | | EQNTKSPLFM |
| | trypsin | | | | of | | | | | | GKVVNPTQK |
| | | | | | pro- | | | | | | |
| | | | | | tein) | | | | | | |
| 84 | alpha-1- | 839 | AMFL- | | N/A | 1771 | GTEAAGAMFL | | N/A | 2681 | EAIPMSIPPE |
| | anti- | | EAIP | | (end | | | | | | VKFNKPFVFL |
| | trypsin | | | | of | | | | | | MIEQNTKSPL |
| | | | | | pro- | | | | | | FMGKVVNPTQ |
| | | | | | tein) | | | | | | K |
| 85 | alpha-1- | 840 | VSLA- | 1360 | LAHQ- | 1772 | LCCLVPVSLA | 2269 | EDPQGDAAQKTD | 2682 | SNSTNIFFSP |
| | anti- | | EDPQ | | SNST | | | | TSHHDQDHPTFN | | |
| | trypsin | | | | | | | | KITPNLAEFAFS | | |
| | | | | | | | | | LYRQLAHQ | | |
| 86 | alpha-1- | 841 | VFLM- | | N/A | 1773 | KFNKPFVFLM | | N/A | 2683 | IEQNTKSPLF |
| | anti- | | IEQN | | (end | | | | | | MGKVVNPTQK |
| | trypsin | | | | of | | | | | | |
| | | | | | pro- | | | | | | |
| | | | | | tein) | | | | | | |
| 87 | alpha-1- | 842 | AAGA- | | N/A | 1774 | DEKGTEAAGA | | N/A | 2684 | MFLEAIPMSI |
| | anti- | | MFLE | | (end | | | | | | PPEVKFNKPF |
| | trypsin | | | | of | | | | | | VFLMIEQNTK |
| | | | | | pro- | | | | | | SPLFMGKVVN |
| | | | | | tein) | | | | | | PTQK |
| 88 | alpha-1- | 843 | EAIP- | | N/A | 1775 | AGAMFLEAIP | | N/A | 2685 | MSIPPEVKFN |
| | anti- | | MSIP | | (end | | | | | | KPFVFLMIEQ |
| | trypsin | | | | of | | | | | | NTKSPLFMGK |
| | | | | | pro- | | | | | | VVNPTQK |
| | | | | | tein) | | | | | | |
| 89 | alpha-1- | 844 | AGAM- | | N/A | 1776 | EKGTEAAGAM | | N/A | 2686 | FLEAIPMSIP |
| | anti- | | FLEA | | (end | | | | | | PEVKFNKPFV |
| | trypsin | | | | of | | | | | | FLMIEQNTKS |
| | | | | | pro- | | | | | | PLFMGKVVNP |
| | | | | | tein) | | | | | | TQK |
| 90 | alpha-1- | 845 | DPQG- | 1361 | AHQS- | 1777 | PVSLAEDPQG | 2270 | DAAQKTDTSHHD | 2687 | NSTNIFFSPV |
| | anti- | | DAAQ | | NSTN | | | | QDHPTFNKITPN | | |
| | trypsin | | | | | | | | LAEFAFSLYRQL | | |
| | | | | | | | | | AHQS | | |
| 91 | alpha-1- | 846 | DEKG- | | N/A | 1778 | KAVLTIDEKG | | N/A | 2688 | TEAAGAMFLE |
| | anti- | | TEAA | | (end | | | | | | AIPMSIPPEV |
| | trypsin | | | | of | | | | | | KFNKPFVFLM |
| | | | | | pro- | | | | | | IEQNTKSPLF |
| | | | | | tein) | | | | | | MGKVVNPTQK |
| 92 | alpha-1- | 847 | EKGT- | | N/A | 1779 | AVLTIDEKGT | | N/A | 2689 | EAAGAMFLEA |
| | anti- | | EAAG | | (end | | | | | | IPMSIPPEVK |
| | trypsin | | | | of | | | | | | FNKPFVFLMI |
| | | | | | pro- | | | | | | EQNTKSPLFM |
| | | | | | tein) | | | | | | GKVVNPTQK |
| 93 | alpha-1- | 848 | AMFL- | | N/A | 1780 | GTEAAGAMFL | | N/A | 2690 | EAIPMSIPPE |
| | anti- | | EAIP | | (end | | | | | | VKFNKPFVFL |
| | trypsin | | | | of | | | | | | MIEQNTKSPL |
| | | | | | pro- | | | | | | FMGKVVNPTQ |
| | | | | | tein) | | | | | | K |
| 94 | alpha-1- | 849 | VSLA- | 1362 | AHQS- | 1781 | LCCLVPVSLA | 2271 | EDPQGDAAQKTD | 2691 | NSTNIFFSPV |
| | anti- | | EDPQ | | NSTN | | | | TSHHDQDHPTFN | | |
| | trypsin | | | | | | | | KITPNLAEFAFS | | |
| | | | | | | | | | LYRQLAHQS | | |
| 95 | alpha-1- | 850 | VSLA- | 1363 | QLAH- | 1782 | LCCLVPVSLA | 2272 | EDPQGDAAQKTD | 2692 | QSNSTNIFFS |
| | anti- | | EDPQ | | QSNS | | | | TSHHDQDHPTFN | | |
| | trypsin | | | | | | | | KITPNLAEFAFS | | |
| | | | | | | | | | LYRQLAH | | |
| 96 | alpha-1- | 851 | KGTE- | | N/A | 1783 | VLTIDEKGTE | | N/A | 2693 | AAGAMFLEAI |
| | anti- | | AAGA | | (end | | | | | | PMSIPPEVKF |
| | trypsin | | | | of | | | | | | NKPFVFLMIE |
| | | | | | pro- | | | | | | QNTKSPLFMG |
| | | | | | tein) | | | | | | KVVNPTQK |
| 97 | alpha-1- | 852 | DPQG- | 1364 | QLAH- | 1784 | PVSLAEDPQG | 2273 | DAAQKTDTSHHD | 2694 | QSNSTNIFFS |
| | anti- | | DAAQ | | QSNS | | | | QDHPTFNKITPN | | |
| | trypsin | | | | | | | | LAEFAFSLYRQL | | |
| | | | | | | | | | AH | | |
| 98 | alpha-1- | 853 | TEAA- | | N/A | 1785 | TIDEKGTEAA | | N/A | 2695 | GAMFLEAIPM |
| | anti- | | GAMF | | (end | | | | | | SIPPEVKFNK |
| | trypsin | | | | of | | | | | | PFVFLMIEQN |
| | | | | | pro- | | | | | | TKSPLFMGKV |
| | | | | | tein) | | | | | | VNPTQK |
| 99 | alpha-1- | 854 | IDEK- | | N/A | 1786 | HKAVLTIDEK | | N/A | 2696 | GTEAAGAMFL |
| | anti- | | GTEA | | (end | | | | | | EAIPMSIPPE |
| | trypsin | | | | of | | | | | | VKFNKPFVFL |
| | | | | | pro- | | | | | | MIEQNTKSPL |
| | | | | | tein) | | | | | | FMGKVVNPTQ |
| | | | | | | | | | | | K |
| 100 | alpha-1- | 855 | EAAG- | | N/A | 1787 | IDEKGTEAAG | | N/A | 2697 | AMFLEAIPMS |
| | anti- | | AMFL | | (end | | | | | | IPPEVKFNKP |
| | trypsin | | | | of | | | | | | FVFLMIEQNT |
| | | | | | pro- | | | | | | KSPLFMGKVV |
| | | | | | tein) | | | | | | NPTQK |
| 101 | alpha-1- | 856 | VSLA- | 1365 | RQLA- | 1788 | LCCLVPVSLA | 2274 | EDPQGDAAQKTD | 2698 | HQSNSTNIFF |
| | anti- | | EDPQ | | HQSN | | | | TSHHDQDHPTFN | | |
| | trypsin | | | | | | | | KITPNLAEFAFS | | |
| | | | | | | | | | LYRQLA | | |
| 102 | alpha-1- | 857 | LAED- | 1366 | LAHQ- | 1789 | CLVPVSLAED | 2275 | PQGDAAQKTDTS | 2699 | SNSTNIFFSP |
| | anti- | | PQGD | | SNST | | | | HHDQDHPTFNKI | | |
| | trypsin | | | | | | | | TPNLAEFAFSLY | | |
| | | | | | | | | | RQLAHQ | | |
| 103 | Complement | 858 | LSLQ- | 1367 | QVVK- | 1790 | ASSFFTLSLQ | 2276 | KPRLLLFSPSVV | 2700 | GSVFLRNPSR |
| | C4-B OR | | KPRL | | GSVF | | | | HLGVPLSVGVQL | | |
| | Complement | | | | | | | | QDVPRGQVVK | | |
| | C4-A | | | | | | | | | | |
| 104 | Complement | 859 | LSLQ- | 1368 | VPRG- | 1791 | ASSFFTLSLQ | 2277 | KPRLLLFSPSVV | 2701 | QVVKGSVFLR |
| | C4-B OR | | KPRL | | QVVK | | | | HLGVPLSVGVQL | | |
| | Complement | | | | | | | | QDVPRG | | |
| | C4-A | | | | | | | | | | |
| 105 | Complement | 860 | LSLQ- | 1369 | PSRN- | 1792 | ASSFFTLSLQ | 2278 | KPRLLLFSPSVV | 2702 | NVPCSPKVDF |
| | C4-B OR | | KPRL | | NVPC | | | | HLGVPLSVGVQL | | |
| | Complement | | | | | | | | QDVPRGQVVKGS | | |
| | C4-A | | | | | | | | VFLRNPSRN | | |
| 106 | Complement | 861 | LSLQ- | 1370 | SRNN- | 1793 | ASSFFTLSLQ | 2279 | KPRLLLFSPSVV | 2703 | VPCSPKVDFT |
| | C4-B OR | | KPRL | | VPCS | | | | HLGVPLSVGVQL | | |
| | Complement | | | | | | | | QDVPRGQVVKGS | | |
| | C4-A | | | | | | | | VFLRNPSRNN | | |
| 107 | Complement | 862 | LSLQ- | 1371 | VPLS- | 1794 | ASSFFTLSLQ | 2280 | KPRLLLFSPSVV | 2704 | VGVQLQDVPR |
| | C4-B OR | | KPRL | | VGVQ | | | | HLGVPLS | | |
| | Complement | | | | | | | | | | |
| | C4-A | | | | | | | | | | |
| 108 | Complement | 863 | LSLQ- | 1372 | GSVF- | 1795 | ASSFFTLSLQ | 2281 | KPRLLLFSPSVV | 2705 | LRNPSRNNVP |
| | C4-B OR | | KPRL | | LRNP | | | | HLGVPLSVGVQL | | |
| | Complement | | | | | | | | QDVPRGQVVKGS | | |
| | C4-A | | | | | | | | VF | | |
| 109 | Complement | 864 | LSLQ- | 1373 | VQLQ- | 1796 | ASSFFTLSLQ | 2282 | KPRLLLFSPSVV | 2706 | DVPRGQVVKG |
| | C4-B OR | | KPRL | | DVPR | | | | HLGVPLSVGVQL | | |
| | Complement | | | | | | | | Q | | |
| | C4-A | | | | | | | | | | |
| 110 | Complement | 865 | LSLQ- | 1374 | VGVQ- | 1797 | ASSFFTLSLQ | 2283 | KPRLLLFSPSVV | 2707 | LQDVPRGQVV |
| | C4-B OR | | KPRL | | LQDV | | | | HLGVPLSVGVQ | | |
| | Complement | | | | | | | | | | |
| | C4-A | | | | | | | | | | |
| 111 | Complement | 866 | STGR- | 1375 | NRQI- | 1798 | LNVTLSSTGR | 2284 | NGFKSHALQLNN | 2708 | RGLEEELQFS |
| | C4-B OR | | NGFK | | RGLE | | | | RQI | | |
| | Complement | | | | | | | | | | |
| | C4-A | | | | | | | | | | |
| 112 | Complement | 867 | LSLQ- | 1376 | VHLG- | 1799 | ASSFFTLSLQ | 2285 | KPRLLLFSPSVV | 2709 | VPLSVGVQLQ |
| | C4-B OR | | KPRL | | VPLS | | | | HLG | | |
| | Complement | | | | | | | | | | |
| | C4-A | | | | | | | | | | |
| 113 | Complement | 868 | STGR- | 1377 | RQIR- | 1800 | LNVTLSSTGR | 2286 | NGFKSHALQLNN | 2710 | GLEEELQFSL |
| | C4-B OR | | NGFK | | GLEE | | | | RQIR | | |
| | Complement | | | | | | | | | | |
| | C4-A | | | | | | | | | | |
| 114 | Complement | 869 | LPAK- | 1378 | GRRN- | 1801 | DYEYDELPAK | 2287 | DDPDAPLQPVTP | 2711 | RRRREAPKVV |
| | C4-B OR | | DDPD | | RRRR | | | | LQLFEGRRN | | |
| | Complement | | | | | | | | | | |
| | C4-A | | | | | | | | | | |
| 115 | Complement | 870 | LSLQ- | 1379 | SVVH- | 1802 | ASSFFTLSLQ | 2288 | KPRLLLFSPSVV | 2712 | LGVPLSVGVQ |
| | C4-B OR | | KPRL | | LGVP | | | | H | | |
| | Complement | | | | | | | | | | |
| | C4-A | | | | | | | | | | |
| 116 | Complement | 871 | RQIR- | 1380 | INVK- | 1803 | ALQLNNRQIR | 2289 | GLEEELQFSLGS | 2713 | VGGNSKGTLK |
| | C4-B OR | | GLEE | | VGGN | | | | KINVK | | |
| | Complement | | | | | | | | | | |
| | C4-A | | | | | | | | | | |
| 117 | Complement | 872 | PAKD- | 1381 | PVTP- | 1804 | YEYDELPAKD | 2290 | DPDAPLQPVTP | 2714 | LQLFEGRRNR |
| | C4-B OR | | DPDA | | LQLF | | | | | | |
| | Complement | | | | | | | | | | |
| | C4-A | | | | | | | | | | |
| 118 | Complement | 873 | LPAK- | 1382 | PVTP- | 1805 | DYEYDELPAK | 2291 | DDPDAPLQPVTP | 2715 | LQLFEGRRNR |
| | C4-B OR | | DDPD | | LQLF | | | | | | |
| | Complement | | | | | | | | | | |
| | C4-A | | | | | | | | | | |
| 119 | Complement | 874 | TGRN- | 1383 | NRQI- | 1806 | NVTLSSTGRN | 2292 | GFKSHALQLNNR | 2716 | RGLEEELQFS |
| | C4-B OR | | GFKS | | RGLE | | | | QI | | |
| | Complement | | | | | | | | | | |
| | C4-A | | | | | | | | | | |
| 120 | Complement | 875 | LPAK- | 1384 | TPLQ- | 1807 | DYEYDELPAK | 2293 | DDPDAPLQPVTP | 2717 | LFEGRRNRRR |
| | C4-B OR | | DDPD | | LFEG | | | | LQ | | |
| | Complement | | | | | | | | | | |
| | C4-A | | | | | | | | | | |
| 121 | Complement | 876 | LSLQ- | 1385 | VFLR- | 1808 | ASSFFTLSLQ | 2294 | KPRLLLFSPSVV | 2718 | NPSRNNVPCS |
| | C4-B OR | | KPRL | | NPSR | | | | HLGVPLSVGVQL | | |
| | Complement | | | | | | | | QDVPRGQVVKGS | | |
| | C4-A | | | | | | | | VFLR | | |
| 122 | Complement | 877 | LPAK- | 1386 | PLQL- | 1809 | DYEYDELPAK | 2295 | DDPDAPLQPVTP | 2719 | FEGRRNRRRR |
| | C4-B OR | | DDPD | | FEGR | | | | LQL | | |
| | Complement | | | | | | | | | | |
| | C4-A | | | | | | | | | | |
| 123 | Complement | 878 | RQIR- | 1387 | LGSK- | 1810 | ALQLNNRQIR | 2296 | GLEEELQFSLGS | 2720 | INVKVGGNSK |
| | C4-B OR | | GLEE | | INVK | | | | K | | |
| | Complement | | | | | | | | | | |
| | C4-A | | | | | | | | | | |
| 124 | Complement | 879 | HRGR- | 1388 | VRVT- | 1811 | ELNPLDHRGR | 2297 | TLEIPGNSDPNM | 2721 | ASDPLDTLGS |
| | C4-B OR | | TLEI | | ASDP | | | | IPDGDFNSYVRV | | |
| | Complement | | | | | | | | T | | |
| | C4-A | | | | | | | | | | |
| 125 | Complement | 880 | PRLL- | 1389 | VGVQ- | 1812 | TLSLQKPRLL | 2298 | LFSPSVVHLGVP | 2722 | LQDVPRGQVV |
| | C4-B OR | | LFSP | | LQDV | | | | LSVGVQ | | |
| | Complement | | | | | | | | | | |
| | C4-A | | | | | | | | | | |
| 126 | Complement | 881 | SELQ- | 1390 | ARLT- | 1813 | IIPQTISELQ | 2299 | LSVSAGSPHPAI | 2723 | VAAPPSGGPG |
| | C4-B OR | | LSVS | | VAAP | | | | ARLT | | |
| | Complement | | | | | | | | | | |
| | C4-A | | | | | | | | | | |
| 127 | Complement | 882 | ARLT- | 1391 | PRVG- | 1814 | SPHPAIARLT | 2300 | VAAPPSGGPGFL | 2724 | DTLNLNLRAV |
| | C4-B OR | | VAAP | | DTLN | | | | SIERPDSRPPRV | | |
| | Complement | | | | | | | | G | | |
| | C4-A | | | | | | | | | | |
| 128 | Complement | 883 | PRLL- | 1392 | VPLS- | 1815 | TLSLQKPRLL | 2301 | LFSPSVVHLGVP | 2725 | VGVQLQDVPR |
| | C4-B OR | | LFSP | | VGVQ | | | | LS | | |
| | Complement | | | | | | | | | | |
| | C4-A | | | | | | | | | | |
| 129 | Complement | 884 | AKDD- | 1393 | GRRN- | 1816 | EYDELPAKDD | 2302 | PDAPLQPVTPLQ | 2726 | RRRREAPKVV |
| | C4-B OR | | PDAP | | RRRR | | | | LFEGRRN | | |
| | Complement | | | | | | | | | | |
| | C4-A | | | | | | | | | | |
| 130 | Complement | 885 | PAKD- | 1394 | GRRN- | 1817 | YEYDELPAKD | 2303 | DPDAPLQPVTPL | 2727 | RRRREAPKVV |
| | C4-B OR | | DPDA | | RRRR | | | | QLFEGRRN | | |
| | Complement | | | | | | | | | | |
| | C4-A | | | | | | | | | | |
| 131 | Complement | 886 | RLLL- | 1395 | VPLS- | 1818 | LSLQKPRLLL | 2304 | FSPSVVHLGVPL | 2728 | VGVQLQDVPR |
| | C4-B OR | | FSPS | | VGVQ | | | | S | | |
| | Complement | | | | | | | | | | |
| | C4-A | | | | | | | | | | |
| 132 | Complement | 887 | DYEY- | 1396 | GRRN- | 1819 | ANEDYEDYEY | 2305 | DELPAKDDPDAP | 2729 | RRRREAPKVV |
| | C4-B OR | | DELP | | RRRR | | | | LQPVTPLQLFEG | | |
| | Complement | | | | | | | | RRN | | |
| | C4-A | | | | | | | | | | |
| 133 | Complement | 888 | PRLL- | 1397 | QVVK- | 1820 | TLSLQKPRLL | 2306 | LFSPSVVHLGVP | 2730 | GSVFLRNPSR |
| | C4-B OR | | LFSP | | GSVF | | | | LSVGVQLQDVPR | | |
| | Complement | | | | | | | | GQVVK | | |
| | C4-A | | | | | | | | | | |
| 134 | Complement | 889 | PRLL- | 1398 | VHLG- | 1821 | TLSLQKPRLL | 2307 | LFSPSVVHLG | 2731 | VPLSVGVQLQ |
| | C4-B OR | | LFSP | | VPLS | | | | | | |
| | Complement | | | | | | | | | | |
| | C4-A | | | | | | | | | | |
| 135 | Complement | 890 | LTVA- | 1399 | PRVG- | 1822 | HPAIARLTVA | 2308 | APPSGGPGFLSI | 2732 | DTLNLNLRAV |
| | C4-B OR | | APPS | | DTLN | | | | ERPDSRPPRVG | | |
| | Complement | | | | | | | | | | |
| | C4-A | | | | | | | | | | |
| 136 | fibrinogen | 891 | DKKR- | 1400 | GGGY- | 1823 | RGHRPLDKKR | 2309 | EEAPSLRPAPPP | 2733 | RARPAKAAAT |
| | beta | | EEAP | | RARP | | | | ISGGGY | | |
| | chain | | | | | | | | | | |
| 137 | fibrinogen | 892 | KKRE- | 1401 | GGGY- | 1824 | GHRPLDKKRE | 2310 | EAPSLRPAPPPI | 2734 | RARPAKAAAT |
| | beta | | EAPS | | RARP | | | | SGGGY | | |
| | chain | | | | | | | | | | |
| 138 | fibrinogen | 893 | LDKK- | 1402 | GGGY- | 1825 | ARGHRPLDKK | 2311 | REEAPSLRPAPP | 2735 | RARPAKAAAT |
| | beta | | REEA | | RARP | | | | PISGGGY | | |
| | chain | | | | | | | | | | |
| 139 | fibrinogen | 894 | LVKS- | 1403 | GGGY- | 1826 | LLLCVFLVKS | 2312 | QGVNDNEEGFFS | 2736 | RARPAKAAAT |
| | beta | | QGVN | | RARP | | | | ARGHRPLDKKRE | | |
| | chain | | | | | | | | EAPSLRPAPPPI | | |
| | | | | | | | | | SGGGY | | |
| 140 | fibrinogen | 895 | LVKS- | 1404 | FSAR- | 1827 | LLLCVFLVKS | 2313 | QGVNDNEEGFFS | 2737 | GHRPLDKKRE |
| | beta | | QGVN | | GHRP | | | | AR | | |
| | chain | | | | | | | | | | |
| 141 | fibrinogen | 896 | LVKS- | 1405 | ARGH- | 1828 | LLLCVFLVKS | 2314 | QGVNDNEEGFFS | 2738 | RPLDKKREEA |
| | beta | | QGVN | | RPLD | | | | ARGH | | |
| | chain | | | | | | | | | | |
| 142 | fibrinogen | 897 | LVKS- | 1406 | FFSA- | 1829 | LLLCVFLVKS | 2315 | QGVNDNEEGFFS | 2739 | RGHRPLDKKR |
| | beta | | QGVN | | RGHR | | | | A | | |
| | chain | | | | | | | | | | |
| 143 | fibrinogen | 898 | LVKS- | 1407 | KKRE- | 1830 | LLLCVFLVKS | 2316 | QGVNDNEEGFFS | 2740 | EAPSLRPAPP |
| | beta | | QGVN | | EAPS | | | | ARGHRPLDKKRE | | |
| | chain | | | | | | | | | | |
| 144 | fibrinogen | 899 | PLDK- | 1408 | GGGY- | 1831 | SARGHRPLDK | 2317 | KREEAPSLRPAP | 2741 | RARPAKAAAT |
| | beta | | KREE | | RARP | | | | PPISGGGY | | |
| | chain | | | | | | | | | | |
| 145 | fibrinogen | 900 | LVKS- | 1409 | GGYR- | 1832 | LLLCVFLVKS | 2318 | QGVNDNEEGFFS | 2742 | ARPAKAAAT |
| | beta | | QGVN | | ARPA | | | | ARGHRPLDKKRE | | |
| | chain | | | | | | | | EAPSLRPAPPPI | | |
| | | | | | | | | | SGGGYR | | |
| 146 | fibrinogen | 901 | LVKS- | 1410 | RPLD- | 1833 | LLLCVFLVKS | 2319 | QGVNDNEEGFFS | 2743 | KKREEAPSLR |
| | beta | | QGVN | | KKRE | | | | ARGHRPLD | | |
| | chain | | | | | | | | | | |
| 147 | fibrinogen | 902 | HRPL- | 1411 | GGGY- | 1834 | FFSARGHRPL | 2320 | DKKREEAPSLRP | 2744 | RARPAKAAAT |
| | beta | | DKKR | | RARP | | | | APPPISGGGY | | |
| | chain | | | | | | | | | | |
| 148 | fibrinogen | 903 | LVKS- | 1412 | DKKR- | 1835 | LLLCVFLVKS | 2321 | QGVNDNEEGFFS | 2745 | EEAPSLRPAP |
| | beta | | QGVN | | EEAP | | | | ARGHRPLDKKR | | |
| | chain | | | | | | | | | | |
| 149 | fibrinogen | 904 | SQGV- | 1413 | FFSA- | 1836 | CVFLVKSQGV | 2322 | NDNEEGFFSA | 2746 | RGHRPLDKKR |
| | beta | | NDNE | | RGHR | | | | | | |
| | chain | | | | | | | | | | |
| 150 | fibrinogen | 905 | LVKS- | 1414 | RPAK- | 1837 | LLLCVFLVKS | 2323 | QGVNDNEEGFFS | 2747 | AAATQKKVER |
| | beta | | QGVN | | AAAT | | | | ARGHRPLDKKRE | | |
| | chain | | | | | | | | EAPSLRPAPPPI | | |
| | | | | | | | | | SGGGYRARPAK | | |
| 151 | fibrinogen | 906 | LVKS- | 1415 | GFFS- | 1838 | LLLCVFLVKS | 2324 | QGVNDNEEGFFS | 2748 | ARGHRPLDKK |
| | beta | | QGVN | | ARGH | | | | | | |
| | chain | | | | | | | | | | |
| 152 | fibrinogen | 907 | KSQG- | 1416 | RPLD- | 1839 | LCVFLVKSQG | 2325 | VNDNEEGFFSAR | 2749 | KKREEAPSLR |
| | beta | | VNDN | | KKRE | | | | GHRPLD | | |
| | chain | | | | | | | | | | |
| 153 | fibrinogen | 908 | KSQG- | 1417 | GGYR- | 1840 | LCVFLVKSQG | 2326 | VNDNEEGFFSAR | 2750 | ARPAKAAATQ |
| | beta | | VNDN | | ARPA | | | | GHRPLDKKREEA | | |
| | chain | | | | | | | | PSLRPAPPPISG | | |
| | | | | | | | | | GGYR | | |
| 154 | fibrinogen | 909 | KSQG- | 1418 | PLDK- | 1841 | LCVFLVKSQG | 2327 | VNDNEEGFFSAR | 2751 | KREEAPSLRP |
| | beta | | VNDN | | KREE | | | | GHRPLDK | | |
| | chain | | | | | | | | | | |
| 155 | fibrinogen | 910 | LVKS- | 1419 | APSL- | 1842 | LLLCVFLVKS | 2328 | QGVNDNEEGFFS | 2752 | RPAPPPISGG |
| | beta | | QGVN | | RPAP | | | | ARGHRPLDKKRE | | |
| | chain | | | | | | | | EAPSL | | |
| 156 | fibrinogen | 911 | LVKS- | 1420 | EAPS- | 1843 | LLLCVFLVKS | 2329 | QGVNDNEEGFFS | 2753 | LRPAPPPISG |
| | beta | | QGVN | | LRPA | | | | ARGHRPLDKKRE | | |
| | chain | | | | | | | | EAPS | | |
| 157 | fibrinogen | 912 | LVKS- | 1421 | LDKK- | 1844 | LLLCVFLVKS | 2330 | QGVNDNEEGFFS | 2754 | REEAPSLRPA |
| | beta | | QGVN | | REEA | | | | ARGHRPLDKK | | |
| | chain | | | | | | | | | | |
| 158 | fibrinogen | 913 | KSQG- | 1422 | FFSA- | 1845 | LCVFLVKSQG | 2331 | VNDNEEGFFSA | 2755 | RGHRPLDKKR |
| | beta | | VNDN | | RGHR | | | | | | |
| | chain | | | | | | | | | | |
| 159 | fibrinogen | 914 | PLDK- | 1423 | GGYR- | 1846 | SARGHRPLDK | 2332 | KREEAPSLRPAP | 2756 | ARPAKAAATQ |
| | beta | | KREE | | ARPA | | | | PPISGGGYR | | |
| | chain | | | | | | | | | | |
| 160 | fibrinogen | 915 | FSAR- | 1424 | GGGY- | 1847 | DNEEGFFSAR | 2333 | GHRPLDKKREEA | 2757 | RARPAKAAAT |
| | beta | | GHRP | | RARP | | | | PSLRPAPPPISG | | |
| | chain | | | | | | | | GGY | | |
| 161 | fibrinogen | 916 | SQGV- | 1425 | RPLD- | 1848 | CVFLVKSQGV | 2334 | NDNEEGFFSARG | 2758 | KKREEAPSLR |
| | beta | | NDNE | | KKRE | | | | HRPLD | | |
| | chain | | | | | | | | | | |
| 162 | fibrinogen | 917 | LVKS- | 1426 | RARP- | 1849 | LLLCVFLVKS | 2335 | QGVNDNEEGFFS | 2759 | AKAAATQKKV |
| | beta | | QGVN | | AKAA | | | | ARGHRPLDKKRE | | |
| | chain | | | | | | | | EAPSLRPAPPPI | | |
| | | | | | | | | | SGGGYRARP | | |
| 163 | fibrinogen | 918 | LVKS- | 1427 | AKAA- | 1850 | LLLCVFLVKS | 2336 | QGVNDNEEGFFS | 2760 | ATQKKVERKA |
| | beta | | QGVN | | ATQK | | | | ARGHRPLDKKRE | | |
| | chain | | | | | | | | EAPSLRPAPPPI | | |
| | | | | | | | | | SGGGYRARPAKA | | |
| | | | | | | | | | A | | |
| 164 | fibrinogen | 919 | MSMK- | | N/A | 1851 | WYSMRKMSMK | | N/A | 2761 | IRPFFPQQ |
| | beta | | IRPF | | (end | | | | | | |
| | chain | | | | of | | | | | | |
| | | | | | pro- | | | | | | |
| | | | | | tein) | | | | | | |
| 165 | fibrinogen | 920 | QGVN- | 1428 | FFSA- | 1852 | VFLVKSQGVN | 2337 | DNEEGFFSA | 2762 | RGHRPLDKKR |
| | beta | | DNEE | | RGHR | | | | | | |
| | chain | | | | | | | | | | |
| 166 | fibrinogen | 921 | LVKS- | 1429 | PPIS- | 1853 | LLLCVFLVKS | 2338 | QGVNDNEEGFFS | 2763 | GGGYRARPAK |
| | beta | | QGVN | | GGGY | | | | ARGHRPLDKKRE | | |
| | chain | | | | | | | | EAPSLRPAPPPI | | |
| | | | | | | | | | S | | |
| 167 | fibrinogen | 922 | LVKS- | 1430 | KREE- | 1854 | LLLCVFLVKS | 2339 | QGVNDNEEGFFS | 2764 | APSLRPAPPP |
| | beta | | QGVN | | APSL | | | | ARGHRPLDKKRE | | |
| | chain | | | | | | | | E | | |
| 168 | fibrinogen | 923 | LVKS- | 1431 | ARPA- | 1855 | LLLCVFLVKS | 2340 | QGVNDNEEGFFS | 2765 | KAAATQKKVE |
| | beta | | QGVN | | KAAA | | | | ARGHRPLDKKRE | | |
| | chain | | | | | | | | EAPSLRPAPPPI | | |
| | | | | | | | | | SGGGYRARPA | | |
| 169 | serum | 924 | NIQR- | | N/A | 1856 | ISDARENIQR | | N/A | 2766 | FFGHGAEDSL |
| | amyloid | | FFGH | | (end | | | | | | ADQAANEWGR |
| | A-1 | | | | of | | | | | | SGKDPNHFRP |
| | protein | | | | pro- | | | | | | AGLPEKY |
| | | | | | tein) | | | | | | |
| 170 | serum | 925 | AAEA- | | N/A | 1857 | GPGGVWAAEA | | N/A | 2767 | ISDARENIQR |
| | amyloid | | ISDA | | (end | | | | | | FFGHGAEDSL |
| | A-1 | | | | of | | | | | | ADQAANEWGR |
| | protein | | | | pro- | | | | | | SGKDPNHFRP |
| | | | | | tein) | | | | | | AGLPEKY |
| 171 | serum | 926 | GAED- | | N/A | 1858 | QRFFGHGAED | | N/A | 2768 | SLADQAANEW |
| | amyloid | | SLAD | | (end | | | | | | GRSGKDPNHF |
| | A-1 | | | | of | | | | | | RPAGLPEKY |
| | protein | | | | pro- | | | | | | |
| | | | | | tein) | | | | | | |
| 172 | serum | 927 | IQRF- | | N/A | 1859 | SDARENIQRF | | N/A | 2769 | FGHGAEDSLA |
| | amyloid | | FGHG | | (end | | | | | | DQAANEWGRS |
| | A-1 | | | | of | | | | | | GKDPNHFRPA |
| | protein | | | | pro- | | | | | | GLPEKY |
| | | | | | tein) | | | | | | |
| 173 | serum | 928 | GVSS- | 1432 | EAFD- | 1860 | FCSLVLGVSS | 2341 | RSFFSFLGEAFD | 2770 | GARDMWRAYS |
| | amyloid | | RSFF | | GARD | | | | | | |
| | A-1 | | | | | | | | | | |
| | protein | | | | | | | | | | |
| 174 | serum | 929 | SGKD- | | N/A | 1861 | ANEWGRSGKD | | N/A | 2771 | PNHFRPAGLP |
| | amyloid | | PNHF | | (end | | | | | | EKY |
| | A-1 | | | | of | | | | | | |
| | protein | | | | pro- | | | | | | |
| | | | | | tein) | | | | | | |
| 175 | serum | 930 | GVWA- | | N/A | 1862 | AKRGPGGVWA | | N/A | 2772 | AEAISDAREN |
| | amyloid | | AEAI | | (end | | | | | | IQRFFGHGAE |
| | A-1 | | | | of | | | | | | DSLADQAANE |
| | protein | | | | pro- | | | | | | WGRSGKDPNH |
| | | | | | tein) | | | | | | FRPAGLPEKY |
| 176 | serum | 931 | ADQA- | | N/A | 1863 | GAEDSLADQA | | N/A | 2773 | ANEWGRSGKD |
| | amyloid | | ANEW | | (end | | | | | | PNHFRPAGLP |
| | A-1 | | | | of | | | | | | EKY |
| | protein | | | | pro- | | | | | | |
| | | | | | tein) | | | | | | |
| 177 | serum | 932 | GEAF- | 1433 | KRGP- | 1864 | SFFSFLGEAF | 2342 | DGARDMWRAYSD | 2774 | GGVWAAEAIS |
| | amyloid | | DGAR | | GGVW | | | | MREANYIGSDKY | | |
| | A-1 | | | | | | | | FHARGNYDAAKR | | |
| | protein | | | | | | | | GP | | |
| 178 | serum | 933 | AISD- | | N/A | 1865 | GVWAAEAISD | | N/A | 2775 | ARENIQRFFG |
| | amyloid | | AREN | | (end | | | | | | HGAEDSLADQ |
| | A-1 | | | | of | | | | | | AANEWGRSGK |
| | protein | | | | pro- | | | | | | DPNHFRPAGL |
| | | | | | tein) | | | | | | PEKY |
| 179 | serum | 934 | VSSR- | 935 | EAFD- | 1866 | CSLVLSVSSR | 2343 | SFFSFLGEAFD | 2776 | GARDMWRAYS |
| | amyloid | | SFFS | | GARD | | | | | | |
| | A-1 pro- | | | | | | | | | | |
| | tein OR | | | | | | | | | | |
| | serum | | | | | | | | | | |
| | amyloid | | | | | | | | | | |
| | A-2 | | | | | | | | | | |
| | protein | | | | | | | | | | |
| 180 | serum | 936 | DSLA- | | N/A | 1867 | FGHGAEDSLA | | N/A | 2777 | DQAANEWGRS |
| | amyloid | | DQAA | | (end | | | | | | GKDPNHFRPA |
| | A-1 | | | | of | | | | | | GLPEKY |
| | protein | | | | pro- | | | | | | |
| | | | | | tein) | | | | | | |
| 181 | serum | 937 | SFFS- | 1434 | KRGP- | 1868 | LSVSSRSFFS | 2344 | FLGEAFDGARDM | 2778 | GGVWAAEVIS |
| | amyloid | | FLGE | | GGVW | | | | WRAYSDMREANY | | |
| | A-1 | | | | | | | | IGSDKYFHARGN | | |
| | protein | | | | | | | | YDAAKRGP | | |
| 182 | serum | 938 | SLAD- | | N/A | 1869 | GHGAEDSLAD | | N/A | 2779 | QAANEWGRSG |
| | amyloid | | QAAN | | (end | | | | | | KDPNHFRPAG |
| | A-1 | | | | of | | | | | | LPEKY |
| | protein | | | | pro- | | | | | | |
| | | | | | tein) | | | | | | |
| 183 | serum | 939 | ENIQ- | | N/A | 1870 | AISDARENIQ | | N/A | 2780 | RFFGHGAEDS |
| | amyloid | | RFFG | | (end | | | | | | LADQAANEWG |
| | A-1 | | | | of | | | | | | RSGKDPNHFR |
| | protein | | | | pro- | | | | | | PAGLPEKY |
| | | | | | tein) | | | | | | |
| 184 | serum | 940 | NIQR- | 1435 | LPEK-Y | 1871 | ISDARENIQR | 2345 | FFGHGAEDSLAD | | N/A |
| | amyloid | | FFGH | | | | | | QAANEWGRSGKD | | |
| | A-1 | | | | | | | | PNHFRPAGLPEK | | |
| | protein | | | | | | | | | | |
| 185 | serum | 941 | FFGH- | | N/A | 1872 | RENIQRFFGH | | N/A | 2781 | GAEDSLADQA |
| | amyloid | | GAED | | (end | | | | | | ANEWGRSGKD |
| | A-1 | | | | of | | | | | | PNHFRPAGLP |
| | protein | | | | pro- | | | | | | EKY |
| | | | | | tein) | | | | | | |
| 186 | serum | 942 | RSGK- | | N/A | 1873 | AANEWGRSGK | | N/A | 2782 | DPNHFRPAGL |
| | amyloid | | DPNH | | (end | | | | | | PEKY |
| | A-1 | | | | of | | | | | | |
| | protein | | | | pro- | | | | | | |
| | | | | | tein) | | | | | | |
| 187 | serum | 943 | RFFG- | | N/A | 1874 | ARENIQRFFG | | N/A | 2783 | HGAEDSLADQ |
| | amyloid | | HGAE | | (end | | | | | | AANEWGRSGK |
| | A-1 | | | | of | | | | | | DPNHFRPAGL |
| | protein | | | | pro- | | | | | | PEKY |
| | | | | | tein) | | | | | | |
| 188 | serum | 944 | EWGR- | | N/A | 1875 | ADQAANEWGR | | N/A | 2784 | SGKDPNHFRP |
| | amyloid | | SGKD | | (end | | | | | | AGLPEKY |
| | A-1 | | | | of | | | | | | |
| | protein | | | | pro- | | | | | | |
| | | | | | tein) | | | | | | |
| 189 | serum | 945 | DQAA- | | N/A | 1876 | AEDSLADQAA | | N/A | 2785 | NEWGRSGKDP |
| | amyloid | | NEWG | | (end | | | | | | NHFRPAGLPE |
| | A-1 | | | | of | | | | | | KY |
| | protein | | | | pro- | | | | | | |
| | | | | | tein) | | | | | | |
| 190 | serum | 946 | EAIS- | | N/A | 1877 | GGVWAAEAIS | | N/A | 2786 | DARENIQRFF |
| | amyloid | | DARE | | (end | | | | | | GHGAEDSLAD |
| | A-1 | | | | of | | | | | | QAANEWGRSG |
| | protein | | | | pro- | | | | | | KDPNHFRPAG |
| | | | | | tein) | | | | | | LPEKY |
| 191 | serum | 947 | RSFF- | 1436 | KRGP- | 1878 | VLSVSSRSFF | 2346 | SFLGEAFDGARD | 2787 | GGVWAAEAIS |
| | amyloid | | SFLG | | GGVW | | | | MWRAYSDMREAN | | |
| | A-1 | | | | | | | | YIGSDKYFHARG | | |
| | protein | | | | | | | | NYDAAKRGP | | |
| 192 | serum | 948 | DSLA- | 1437 | FRPA- | 1879 | FGHGAEDSLA | 2347 | DQAANEWGRSGK | 2788 | GLPEKY |
| | amyloid | | DQAA | | GLPE | | | | DPNHFRPA | | |
| | A-1 | | | | | | | | | | |
| | protein | | | | | | | | | | |
| 193 | serum | 949 | AISD- | 1438 | GAED- | 1880 | GVWAAEAISD | 2348 | ARENIQRFFGHG | 2789 | SLADQAANEW |
| | amyloid | | AREN | | SLAD | | | | AED | | |
| | A-1 | | | | | | | | | | |
| | protein | | | | | | | | | | |
| 194 | serum | 950 | EDSL- | | N/A | 1881 | FFGHGAEDSL | | N/A | 2790 | ADQAANEWGR |
| | amyloid | | ADQA | | (end | | | | | | SGKDPNHFRP |
| | A-1 | | | | of | | | | | | AGLPEKY |
| | protein | | | | pro- | | | | | | |
| | | | | | tein) | | | | | | |
| 195 | serum | 951 | AEAI- | | N/A | 1882 | PGGVWAAEAI | | N/A | 2791 | SDARENIQRF |
| | amyloid | | SDAR | | (end | | | | | | FGHGAEDSLA |
| | A-1 | | | | of | | | | | | DQAANEWGRS |
| | protein | | | | pro- | | | | | | GKDPNHFRPA |
| | | | | | tein) | | | | | | GLPEKY |
| 196 | serum | 952 | FSFL- | 1439 | KRGP- | 1883 | VSSRSFFSFL | 2349 | GEAFDGARDMWR | 2792 | GGVWAAEAIS |
| | amyloid | | GEAF | | GGVW | | | | AYSDMREANYIG | | |
| | A-1 | | | | | | | | SDKYFHARGNYD | | |
| | protein | | | | | | | | AAKRGP | | |
| 197 | serum | 953 | FHAR- | | N/A | 1884 | IGSDKYFHAR | | N/A | 2793 | GNYDAAKRGP |
| | amyloid | | GNYD | | (end | | | | | | GGVWAAEAIS |
| | A-1 | | | | of | | | | | | DARENIQRFF |
| | protein | | | | pro- | | | | | | GHGAEDSLAD |
| | | | | | tein) | | | | | | QAANEWGRSG |
| | | | | | | | | | | | KDPNHFRPA |
| | | | | | | | | | | | GLPEKY |
| 198 | serum | 954 | GVSS- | 1440 | FSFL- | 1885 | FCSLVLGVSS | 2350 | RSFFSFL | 2794 | GEAFDGARDM |
| | amyloid | | RSFF | | GEAF | | | | | | |
| | A-1 pro- | | | | | | | | | | |
| | tein OR | | | | | | | | | | |
| | serum | | | | | | | | | | |
| | amyloid | | | | | | | | | | |
| | A-2 | | | | | | | | | | |
| | protein | | | | | | | | | | |
| 199 | serum | 955 | KRGP- | | N/A | 1886 | GNYDAAKRGP | | N/A | 2795 | GGVWAAEAIS |
| | amyloid | | GGVW | | (end | | | | | | DARENIQRFF |
| | A-1 | | | | of | | | | | | GHGAEDSLAD |
| | protein | | | | pro | | | | | | QAANEWGRSG |
| | | | | | tein) | | | | | | KDPNHFRPAG |
| | | | | | | | | | | | LPEKY |
| 200 | trans- | 956 | FTAN- | | N/A | 1887 | EHAEVVFTAN | | N/A | 2796 | DSGPRRYTIA |
| | thyretin | | DSGP | | (end | | | | | | ALLSPYSYST |
| | | | | | of | | | | | | TAVVTNPKE |
| | | | | | pro- | | | | | | |
| | | | | | tein) | | | | | | |
| 201 | trans- | 957 | ANDS- | | N/A | 1888 | AEVVFTANDS | | N/A | 2797 | GPRRYTIAAL |
| | thyretin | | GPRR | | (end | | | | | | LSPYSYSTTA |
| | | | | | of | | | | | | VVTNPKE |
| | | | | | pro- | | | | | | |
| | | | | | tein) | | | | | | |
| 202 | trans- | 958 | ANDS- | 1441 | TNPK-E | 1889 | AEVVFTANDS | 2351 | GPRRYTIAALLS | | N/A |
| | thyretin | | GPRR | | | | | | PYSYSTTAVVTN | | |
| | | | | | | | | | PK | | |
| 203 | trans- | 959 | TAND- | | N/A | 1890 | HAEVVFTAND | | N/A | 2798 | SGPRRYTIAA |
| | thyretin | | SGPR | | (end | | | | | | LLSPYSYSTT |
| | | | | | of | | | | | | AVVTNPKE |
| | | | | | pro- | | | | | | |
| | | | | | tein) | | | | | | |
| 204 | trans- | 960 | NDSG- | | N/A | 1891 | EVVFTANDSG | | N/A | 2799 | PRRYTIAALL |
| | thyretin | | PRRY | | (end | | | | | | SPYSYSTTAV |
| | | | | | of | | | | | | VTNPKE |
| | | | | | pro- | | | | | | |
| | | | | | tein) | | | | | | |
| 205 | trans- | 961 | AALL- | | N/A | 1892 | PRRYTIAALL | | N/A | 2800 | SPYSYSTTAV |
| | thyretin | | SPYS | | (end | | | | | | VTNPKE |
| | | | | | of | | | | | | |
| | | | | | pro- | | | | | | |
| | | | | | tein) | | | | | | |
| 206 | trans- | 962 | YTIA- | | N/A | 1893 | DSGPRRYTIA | | N/A | 2801 | ALLSPYSYST |
| | thyretin | | ALLS | | (end | | | | | | TAVVTNPKE |
| | | | | | of | | | | | | |
| | | | | | pro- | | | | | | |
| | | | | | tein) | | | | | | |
| 207 | trans- | 963 | RRYT- | | N/A | 1894 | ANDSGPRRYT | | N/A | 2802 | IAALLSPYSY |
| | thyretin | | IAAL | | (end | | | | | | STTAVVTNPK |
| | | | | | of | | | | | | E |
| | | | | | pro- | | | | | | |
| | | | | | tein) | | | | | | |
| 208 | trans- | 964 | EVVF- | | N/A | 1895 | PFHEHAEVVF | | N/A | 2803 | TANDSGPRRY |
| | thyretin | | TAND | | (end | | | | | | TIAALL |
| | | | | | of | | | | | | SPYSYSTTAV |
| | | | | | pro- | | | | | | VTNPKE |
| | | | | | tein) | | | | | | |
| 209 | trans- | 965 | KALG- | | N/A | 1896 | DTKSYWKALG | | N/A | 2804 | ISPFHEHAEV |
| | thyretin | | ISPF | | (end | | | | | | VFTANDSGPR |
| | | | | | of | | | | | | RYTIAALLSP |
| | | | | | pro- | | | | | | YSYSTTAVVT |
| | | | | | tein) | | | | | | NPKE |
| 210 | alpha-2- | 966 | PVSA- | 1442 | TALK- | 1897 | PCSVFSPVSA | 2352 | MEPLGRQLTSGP | 2805 | SPPGVCSRDP |
| | anti- | | MEPL | | SPPG | | | | NQEQVSPLTLLK | | |
| | plasmin | | | | | | | | LGNQEPGGQTAL | | |
| | | | | | | | | | K | | |
| 211 | alpha-2- | 967 | PVSA- | 1443 | TLLK- | 1898 | PCSVFSPVSA | 2353 | MEPLGRQLTSGP | 2806 | LGNQEPGGQT |
| | anti- | | MEPL | | LGNQ | | | | NQEQVSPLTLLK | | |
| | plasmin | | | | | | | | | | |
| 212 | alpha-2- | 968 | TSGP- | 1444 | TALK- | 1899 | PLGRQLTSGP | 2354 | NQEQVSPLTLLK | 2807 | SPPGVCSRDP |
| | anti- | | NQEQ | | SPPG | | | | LGNQEPGGQTAL | | |
| | plasmin | | | | | | | | K | | |
| 213 | alpha-2- | 969 | PDLK- | | N/A | 1900 | GDKLFGPDLK | | N/A | 2808 | LVPPMEEDYP |
| | anti- | | LVPP | | (end | | | | | | QFGSPK |
| | plasmin | | | | of | | | | | | |
| | | | | | pro- | | | | | | |
| | | | | | tein) | | | | | | |
| 214 | alpha-2- | 970 | RQLT- | 1445 | TLLK- | 1901 | AMEPLGRQLT | 2355 | SGPNQEQVSPLT | 2809 | LGNQEPGGQT |
| | anti- | | SGPN | | LGNQ | | | | LLK | | |
| | plasmin | | | | | | | | | | |
| 215 | alpha-2- | 971 | PVSA- | 1446 | TSGP- | 1902 | PCSVFSPVSA | 2356 | MEPLGRQLTSGP | 2810 | NQEQVSPLTL |
| | anti- | | MEPL | | NQEQ | | | | | | |
| | plasmin | | | | | | | | | | |
| 216 | alpha-2- | 972 | VSAM- | 1447 | TSGP- | 1903 | CSVFSPVSAM | 2357 | EPLGRQLTSGP | 2811 | NQEQVSPLTL |
| | anti- | | EPLG | | NQEQ | | | | | | |
| | plasmin | | | | | | | | | | |
| 217 | alpha-2- | 973 | TSGP- | 1448 | TLLK- | 1904 | PLGRQLTSGP | 2358 | NQEQVSPLTLLK | 2812 | LGNQEPGGQT |
| | anti- | | NQEQ | | LGNQ | | | | | | |
| | plasmin | | | | | | | | | | |
| 218 | alpha-2- | 974 | TSGP- | 1449 | LKLG- | 1905 | PLGRQLTSGP | 2359 | NQEQVSPLTLLK | 2813 | NQEPGGQTAL |
| | anti- | | NQEQ | | NQEP | | | | LG | | |
| | plasmin | | | | | | | | | | |
| 219 | alpha-2- | 975 | AMSR- | 1450 | KEQQ- | 1906 | AAATSIAMSR | 2360 | MSLSSFSVNRPF | 2814 | DSPGNKDFLQ |
| | anti- | | MSLS | | DSPG | | | | LFFIFEDTTGLP | | |
| | plasmin | | | | | | | | LFVGSVRNPNPS | | |
| | | | | | | | | | APRELKEQQ | | |
| 220 | alpha-2- | 976 | PVSA- | 1451 | PLTL- | 1907 | PCSVFSPVSA | 2361 | MEPLGRQLTSGP | 2815 | LKLGNQEPGG |
| | anti- | | MEPL | | LKLG | | | | NQEQVSPLTL | | |
| | plasmin | | | | | | | | | | |
| 221 | apolipo- | 977 | LLPV- | | N/A | 1908 | EDLRQGLLPV | | N/A | 2816 | LESFKVSFLS |
| | protein | | LESF | | (end | | | | | | ALEEYTKKLN |
| | A-I | | | | of | | | | | | TQ |
| | | | | | pro- | | | | | | |
| | | | | | tein) | | | | | | |
| 222 | apolipo- | 978 | LPVL- | | N/A | 1909 | DLRQGLLPVL | | N/A | 2817 | ESFKVSFLSA |
| | protein | | ESFK | | (end | | | | | | LEEYTKKLNT |
| | A-I | | | | of | | | | | | Q |
| | | | | | pro- | | | | | | |
| | | | | | tein) | | | | | | |
| 223 | apolipo | 979 | RVKD- | 1452 | GKQL- | 1910 | PQSPWDRVKD | 2362 | LATVYVDVLKDS | 2818 | NLKLLDNWDS |
| | protein | | LATV | | NLKL | | | | GRDYVSQFEGSA | | |
| | A-I | | | | | | | | LGKQL | | |
| | Isoform 1 | | | | | | | | | | |
| 224 | apolipo- | 980 | FWQQ- | 1453 | DVLK- | 1911 | GSQARHFWQQ | 2363 | DEPPQSPWDRVK | 2819 | DSGRDYVSQF |
| | protein | | DEPP | | DSGR | | | | DLATVYVDVLK | | |
| | A-I | | | | | | | | | | |
| 225 | apolipo- | 981 | PVLE- | | N/A | 1912 | LRQGLLPVLE | | N/A | 2820 | SFKVSFLSAL |
| | protein | | SFKV | | (end | | | | | | EEYTKKLNTQ |
| | A-I | | | | of | | | | | | |
| | | | | | pro- | | | | | | |
| | | | | | tein) | | | | | | |
| 226 | apolipo- | 982 | ESFK- | | N/A | 1913 | GLLPVLESFK | | N/A | 2821 | VSFLSALEEY |
| | protein | | VSFL | | (end | | | | | | TKKLNTQ |
| | A-I | | | | of | | | | | | |
| | | | | | pro- | | | | | | |
| | | | | | tein) | | | | | | |
| 227 | apolipo- | 983 | EFWD- | 1454 | RQEM- | 1914 | LGPVTQEFWD | 2364 | NLEKETEGLRQE | 2822 | SKDLEEVKAK |
| | protein | | NLEK | | SKDL | | | | M | | |
| | A-I | | | | | | | | | | |
| 228 | apolipo- | 984 | VSFL- | | N/A | 1915 | VLESFKVSFL | | N/A | 2823 | SALEEYTKKL |
| | protein | | SALE | | (end | | | | | | NTQ |
| | A-I | | | | of | | | | | | |
| | | | | | pro- | | | | | | |
| | | | | | tein) | | | | | | |
| 229 | apolipo- | 985 | SFKV- | | N/A | 1916 | LLPVLESFKV | | N/A | 2824 | SFLSALEEYT |
| | protein | | SFLS | | (end | | | | | | KKLNTQ |
| | A-I | | | | of | | | | | | |
| | | | | | pro- | | | | | | |
| | | | | | tein) | | | | | | |
| 230 | apolipo- | 986 | FWQQ- | 1455 | RVKD- | 1917 | GSQARHFWQQ | 2365 | DEPPQSPWDRVK | 2825 | LATVYVDVLK |
| | protein | | DEPP | | LATV | | | | D | | |
| | A-I | | | | | | | | | | |
| 231 | apolipo- | 987 | EPLR- | 1456 | HELQ- | 1918 | LYRQKVEPLR | 2366 | AELQEGARQKLH | 2826 | EKLSPLGEEM |
| | protein | | AELQ | | EKLS | | | | ELQ | | |
| | A-I | | | | | | | | | | |
| 232 | apolipo- | 988 | EPLR- | 1457 | SPLG- | 1919 | LYRQKVEPLR | 2367 | AELQEGARQKLH | 2827 | EEMRDRARAH |
| | protein | | AELQ | | EEMR | | | | ELQEKLSPLG | | |
| | A-I | | | | | | | | | | |
| 233 | apolipo- | 989 | FWQQ- | 1458 | ATVY- | 1920 | GSQARHFWQQ | 2368 | DEPPQSPWDRVK | 2828 | VDVLKDSGRD |
| | protein | | DEPP | | VDVL | | | | DLATVY | | |
| | A-I | | | | | | | | | | |
| 234 | alpha-1- | 990 | LLSA- | | N/A | 1921 | TAVKITLLSA | | N/A | 2829 | LVETRTIVRF |
| | antichy- | | LVET | | (end | | | | | | NRPFLMIIVP |
| | motrypsin | | | | of | | | | | | TDTQNIFFMS |
| | | | | | pro- | | | | | | KVTNPKQA |
| | | | | | tein) | | | | | | |
| 235 | alpha-1- | 991 | ITLL- | | N/A | 1922 | AATAVKITLL | | N/A | 2830 | SALVETRTIV |
| | antichy- | | SALV | | (end | | | | | | RFNRPFLMII |
| | motrypsin | | | | of | | | | | | VPTDTQNIFF |
| | | | | | pro- | | | | | | MSKVTNPKQA |
| | | | | | tein) | | | | | | |
| 236 | alpha-1- | 992 | LSAL- | | N/A | 1923 | AVKITLLSAL | | N/A | 2831 | VETRTIVRFN |
| | antichy- | | VETR | | (end | | | | | | RPFLMIIVPT |
| | motrypsin | | | | of | | | | | | DTQNIFFMSK |
| | | | | | pro- | | | | | | VTNPKQA |
| | | | | | tein) | | | | | | |
| 237 | alpha-1- | 993 | ALVE- | | N/A | 1924 | KITLLSALVE | | N/A | 2832 | TRTIVRFNRP |
| | antichy- | | TRTI | | (end | | | | | | FLMIIVPTDT |
| | motrypsin | | | | of | | | | | | QNIFFMSKVT |
| | | | | | pro- | | | | | | NPKQA |
| | | | | | tein) | | | | | | |
| 238 | alpha-1- | 994 | VPTD- | | N/A | 1925 | PFLMIIVPTD | | N/A | 2833 | TQNIFFMSKV |
| | antichy- | | TQNI | | (end | | | | | | TNPKQA |
| | motrypsin | | | | of | | | | | | |
| | | | | | pro- | | | | | | |
| | | | | | tein) | | | | | | |
| 239 | alpha-1- | 995 | TLLS- | | N/A | 1926 | ATAVKITLLS | | N/A | 2834 | ALVETRTIVR |
| | antichy- | | ALVE | | (end | | | | | | FNRPFLMIIV |
| | motrypsin | | | | of | | | | | | PTDTQNIFFM |
| | | | | | pro- | | | | | | SKVTNPKQA |
| | | | | | tein) | | | | | | |
| 240 | alpha-1- | 996 | LCHP- | 1459 | ENLT- | 1927 | GFCPAVLCHP | 2369 | NSPLDEENLT | 2835 | QENQDRGTHV |
| | antichy- | | NSPL | | QENQ | | | | | | |
| | motrypsin | | | | | | | | | | |
| 241 | alpha-1- | 997 | PFLM- | | N/A | 1928 | IVRFNRPFLM | | N/A | 2836 | IIVPTDTQNI |
| | antichy- | | IIVP | | (end | | | | | | FFMSKVTNPK |
| | motrypsin | | | | of | | | | | | QA |
| | | | | | pro- | | | | | | |
| | | | | | tein) | | | | | | |
| 242 | alpha-1- | 998 | AVLC- | 1460 | LGLA- | 1929 | AAGFCPAVLC | 2370 | HPNSPLDEENLT | 2837 | SANVDFAFSL |
| | antichy- | | HPNS | | SANV | | | | QENQDRGTHVDL | | |
| | motrypsin | | | | | | | | GLA | | |
| 243 | glucagon | 999 | GSWQ- | 1461 | MNED- | 1930 | FVMLVQGSWQ | 2371 | RSLQDTEEKSRS | 2838 | KRHSQGTFTS |
| | | | RSLQ | | KRHS | | | | FSASQADPLSDP | | |
| | | | | | | | | | DQMNED | | |
| 244 | glucagon | 1000 | GSWQ- | 1462 | QMNE- | 1931 | FVMLVQGSWQ | 2372 | RSLQDTEEKSRS | 2839 | DKRHSQGTFT |
| | | | RSLQ | | DKRH | | | | FSASQADPLSDP | | |
| | | | | | | | | | DQMNE | | |
| 245 | glucagon | 1001 | WQRS- | 1463 | MNED- | 1932 | MLVQGSWQRS | 2373 | LQDTEEKSRSFS | 2840 | KRHSQGTFTS |
| | | | LQDT | | KRHS | | | | ASQADPLSDPDQ | | |
| | | | | | | | | | MNED | | |
| 246 | glucagon | 1002 | SWQR- | 1464 | MNED- | 1933 | VMLVQGSWQR | 2374 | SLQDTEEKSRSF | 2841 | KRHSQGTFTS |
| | | | SLQD | | KRHS | | | | SASQADPLSDPD | | |
| | | | | | | | | | QMNED | | |
| 247 | glucagon | 1003 | EDKR- | 1465 | RAQD- | 1934 | DPDQMNEDKR | 2375 | HSQGTFTSDYSK | 2842 | FVQWLMNTKR |
| | | | HSQG | | FVQW | | | | YLDSRRAQD | | |
| 248 | glucagon | 1004 | WQRS- | 1466 | QMNE- | 1935 | MLVQGSWQRS | 2376 | LQDTEEKSRSFS | 2843 | DKRHSQGTFT |
| | | | LQDT | | DKRH | | | | ASQADPLSDPDQ | | |
| | | | | | | | | | MNE | | |
| 249 | glucagon | 1005 | EDKR- | 1467 | LMNT- | 1936 | DPDQMNEDKR | 2377 | HSQGTFTSDYSK | 2844 | KRNRNNIAKR |
| | | | HSQG | | KRNR | | | | YLDSRRAQDFVQ | | |
| | | | | | | | | | WLMNT | | |
| 250 | glucagon | 1006 | QRSL- | 1468 | MNED- | 1937 | LVQGSWQRSL | 2378 | QDTEEKSRSFSA | 2845 | KRHSQGTFTS |
| | | | QDTE | | KRHS | | | | SQADPLSDPDQM | | |
| | | | | | | | | | NED | | |
| 251 | glucagon | 1007 | SWQR- | 1469 | QMNE- | 1938 | VMLVQGSWQR | 2379 | SLQDTEEKSRSF | 2846 | DKRHSQGTFT |
| | | | SLQD | | DKRH | | | | SASQADPLSDPD | | |
| | | | | | | | | | QMNE | | |
| 252 | glucagon | 1008 | RGRR- | 1470 | KITD- | 1939 | AWLVKGRGRR | 2380 | DFPEEVAIVEEL | | N/A |
| | | | DFPE | | RK | | | | GRRHADGSFSDE | | |
| | | | | | | | | | MNTILDNLAARD | | |
| | | | | | | | | | FINWLIQTKITD | | |
| 253 | glucagon | 1009 | IAKR- | 1471 | KGRG- | 1940 | KRNRNNIAKR | 2381 | HDEFERHAEGTF | 2847 | RRDFPEEVAI |
| | | | HDEF | | RRDF | | | | TSDVSSYLEGQA | | |
| | | | | | | | | | AKEFIAWLVKGR | | |
| | | | | | | | | | G | | |
| 254 | hepcidin | 1010 | LTSG- | 1472 | PMFQ- | 1941 | LLLLASLTSG | 2382 | SVFPQQTGQLAE | 2848 | RRRRRDTHFP |
| | | | SVFP | | RRRR | | | | LQPQDRAGARAS | | |
| | | | | | | | | | WMPMFQ | | |
| 255 | hepcidin | 1011 | LTSG- | 1473 | WMPM- | 1942 | LLLLASLTSG | 2383 | SVFPQQTGQLAE | 2849 | FQRRRRRDTH |
| | | | SVFP | | FQRR | | | | LQPQDRAGARAS | | |
| | | | | | | | | | WMPM | | |
| 256 | hepcidin | 1012 | LTSG- | 1474 | SWMP- | 1943 | LLLLASLTSG | 2384 | SVFPQQTGQLAE | 2850 | MFQRRRRRDT |
| | | | SVFP | | MFQR | | | | LQPQDRAGARAS | | |
| | | | | | | | | | WMP | | |
| 257 | hepcidin | 1013 | LTSG- | 1475 | GARA- | 1944 | LLLLASLTSG | 2385 | SVFPQQTGQLAE | 2851 | SWMPMFQRRR |
| | | | SVFP | | SWMP | | | | LQPQDRAGARA | | |
| 258 | hepcidin | 1014 | LTSG- | 1476 | ARAS- | 1945 | LLLLASLTSG | 2386 | SVFPQQTGQLAE | 2852 | WMPMFQRRRR |
| | | | SVFP | | WMPM | | | | LQPQDRAGARAS | | |
| 259 | hepcidin | 1015 | LTSG- | 1477 | RAGA- | 1946 | LLLLASLTSG | 2387 | SVFPQQTGQLAE | 2853 | RASWMPMFQR |
| | | | SVFP | | RASW | | | | LQPQDRAGA | | |
| 260 | hepcidin | 1016 | SVFP- | 1478 | ARAS- | 1947 | ASLTSGSVFP | 2388 | QQTGQLAELQPQ | 2854 | WMPMFQRRRR |
| | | | QQTG | | WMPM | | | | DRAGARAS | | |
| 261 | hepcidin | 1017 | TSGS- | 1479 | ARAS- | 1948 | LLLASLTSGS | 2389 | VFPQQTGQLAEL | 2855 | WMPMFQRRRR |
| | | | VFPQ | | WMPM | | | | QPQDRAGARAS | | |
| 262 | hepcidin | 1018 | SVFP- | 1480 | RAGA- | 1949 | ASLTSGSVFP | 2390 | QQTGQLAELQPQ | 2856 | RASWMPMFQR |
| | | | QQTG | | RASW | | | | DRAGA | | |
| 263 | hepcidin | 1019 | LTSG- | 1481 | QLAE- | 1950 | LLLLASLTSG | 2391 | SVFPQQTGQLAE | 2857 | LQPQDRAGAR |
| | | | SVFP | | LQPQ | | | | | | |
| 264 | hepcidin | 1020 | LTSG- | 1482 | AGAR- | 1951 | LLLLASLTSG | 2392 | SVFPQQTGQLAE | 2858 | ASWMPMFQRR |
| | | | SVFP | | ASWM | | | | LQPQDRAGAR | | |
| 265 | hepcidin | 1021 | LTSG- | 1483 | ELQP- | 1952 | LLLLASLTSG | 2393 | SVFPQQTGQLAE | 2859 | QDRAGARASW |
| | | | SVFP | | QDRA | | | | LQP | | |
| 266 | serum | 1022 | NIQR- | | N/A | 1953 | GPNARENIQR | | N/A | 2860 | LTGRGAEDSL |
| | amyloid | | LTGR | | (end | | | | | | ADQAANKWGR |
| | A-2 | | | | of | | | | | | SGRDPNHFRP |
| | protein | | | | pro- | | | | | | AGLPEKY |
| | | | | | tein) | | | | | | |
| 267 | serum | 1023 | IQRL- | | N/A | 1954 | PNARENIQRL | | N/A | 2861 | TGRGAEDSLA |
| | amyloid | | TGRG | | (end | | | | | | DQAANKWGRS |
| | A-2 | | | | of | | | | | | GRDPNHFRPA |
| | protein | | | | pro- | | | | | | GLPEKY |
| | | | | | tein) | | | | | | |
| 268 | serum | 1024 | RSGR- | | N/A | 1955 | AANKWGRSGR | | N/A | 2862 | DPNHFRPAGL |
| | amyloid | | DPNH | | (end | | | | | | PEKY |
| | A-2 | | | | of | | | | | | |
| | protein | | | | pro- | | | | | | |
| | | | | | tein) | | | | | | |
| 269 | serum | 1025 | QRLT- | | N/A | 1956 | NARENIQRLT | | N/A | 2863 | GRGAEDSLAD |
| | amyloid | | GRGA | | (end | | | | | | QAANKWGRSG |
| | A-2 | | | | of | | | | | | RDPNHFRPAG |
| | protein | | | | pro- | | | | | | LPEKY |
| | | | | | tein) | | | | | | |
| 270 | serum | 1026 | IQRL- | 1484 | DPNH- | 1957 | PNARENIQRL | 2394 | TGRGAEDSLADQ | 2864 | FRPAGLPEKY |
| | amyloid | | TGRG | | FRPA | | | | AANKWGRSGRDP | | |
| | A-2 | | | | | | | | NH | | |
| | protein | | | | | | | | | | |
| 271 | serum | 1027 | NIQR- | 1485 | DPNH- | 1958 | GPNARENIQR | 2395 | LTGRGAEDSLAD | 2865 | FRPAGLPEKY |
| | amyloid | | LTGR | | FRPA | | | | QAANKWGRSGRD | | |
| | A-2 | | | | | | | | PNH | | |
| | protein | | | | | | | | | | |
| 272 | serum | 1028 | GAED- | | N/A | 1959 | QRLTGRGAED | | N/A | 2866 | SLADQAANKW |
| | amyloid | | SLAD | | (end | | | | | | GRSGRDPNHF |
| | A-2 | | | | of | | | | | | RPAGLPEKY |
| | protein | | | | pro- | | | | | | |
| | | | | | tein) | | | | | | |
| 273 | serum | 1029 | RLTG- | | N/A | 1960 | ARENIQRLTG | | N/A | 2867 | RGAEDSLADQ |
| | amyloid | | RGAE | | (end | | | | | | AANKWGRSGR |
| | A-2 | | | | of | | | | | | DPNHFRPAGL |
| | protein | | | | pro- | | | | | | PEKY |
| | | | | | tein) | | | | | | |
| 274 | serum | 1030 | TGRG- | 1486 | DPNH- | 1961 | ENIQRLTGRG | 2396 | AEDSLADQAANK | 2868 | FRPAGLPEKY |
| | amyloid | | AEDS | | FRPA | | | | WGRSGRDPNH | | |
| | A-2 | | | | | | | | | | |
| | protein | | | | | | | | | | |
| 275 | serum | 1031 | AAKR- | 1487 | AEVI- | 1962 | ARGNYDAAKR | 2397 | GPGGAWAAEVI | 2869 | SNARENIQRL |
| | amyloid | | GPGG | | SNAR | | | | | | |
| | A-2 | | | | | | | | | | |
| | protein | | | | | | | | | | |
| 276 | serum | 1032 | GAWA- | | N/A | 1963 | AKRGPGGAWA | | N/A | 2870 | AEVISNAREN |
| | amyloid | | AEVI | | (end | | | | | | IQRLTGRGAE |
| | A-2 | | | | of | | | | | | DSLADQAANK |
| | protein | | | | pro- | | | | | | WGRSGRDPNH |
| | | | | | tein) | | | | | | FRPAGLPEKY |
| 277 | serum | 1033 | DSLA- | | N/A | 1964 | TGRGAEDSLA | | N/A | 2871 | DQAANKWGRS |
| | amyloid | | DQAA | | (end | | | | | | GRDPNHFRPA |
| | A-2 | | | | of | | | | | | GLPEKY |
| | protein | | | | pro- | | | | | | |
| | | | | | tein) | | | | | | |
| 278 | serum | 1034 | AWAA- | | N/A | 1965 | KRGPGGAWAA | | N/A | 2872 | EVISNARENI |
| | amyloid | | EVIS | | (end | | | | | | QRLTGRGAED |
| | A-2 | | | | of | | | | | | SLADQAANKW |
| | protein | | | | pro- | | | | | | GRSGRDPNHF |
| | | | | | tein) | | | | | | RPAGLPEKY |
| 279 | thymosin | 1035 | M- | 1488 | KSKL- | | N/A | 2398 | SDKPDMAEIEKF | 2873 | KKTETQEKNP |
| | beta-4 | | SDKP | | KKTE | | | | DKSKL | | |
| 280 | thymosin | 1036 | M- | 1489 | KKTE- | | N/A | 2399 | SDKPDMAEIEKF | 2874 | TQEKNPLPSK |
| | beta-4 | | SDKP | | TQEK | | | | DKSKLKKTE | | |
| 281 | thymosin | 1037 | KTET- | | N/A | 1966 | DKSKLKKTET | | N/A | 2875 | QEKNPLPSKE |
| | beta-4 | | QEKN | | (end | | | | | | TIEQEKQAGE |
| | | | | | of | | | | | | S |
| | | | | | pro- | | | | | | |
| | | | | | tein) | | | | | | |
| 282 | thymosin | 1038 | M- | | N/A | | N/A | | N/A | 2876 | SDKPDMAEIE |
| | beta-4 | | SDKP | | (end | | | | | | KFDKSKLKKT |
| | | | | | of | | | | | | ETQEKNPLPS |
| | | | | | pro- | | | | | | KETIEQEKQA |
| | | | | | tein) | | | | | | GES |
| 283 | thymosin | 1039 | M- | 1490 | ETQE- | | N/A | 2400 | SDKPDMAEIEKF | 2877 | KNPLPSKETI |
| | beta-4 | | SDKP | | KNPL | | | | DKSKLKKTETQE | | |
| 284 | thymosin | 1040 | KKTE- | | N/A | 1967 | FDKSKLKKTE | | N/A | 2878 | TQEKNPLPSK |
| | beta-4 | | TQEK | | (end | | | | | | ETIEQEKQAG |
| | | | | | of | | | | | | ES |
| | | | | | pro- | | | | | | |
| | | | | | tein) | | | | | | |
| 285 | thymosin | 1041 | ETQE- | | N/A | 1968 | SKLKKTETQE | | N/A | 2879 | KNPLPSKETI |
| | beta-4 | | KNPL | | (end | | | | | | EQEKQAGES |
| | | | | | of | | | | | | |
| | | | | | pro- | | | | | | |
| | | | | | tein) | | | | | | |
| 286 | thymosin | 1042 | KLKK- | | N/A | 1969 | EKFDKSKLKK | | N/A | 2880 | TETQEKNPLP |
| | beta-4 | | TETQ | | (end | | | | | | SKETIEQEKQ |
| | | | | | of | | | | | | AGES |
| | | | | | pro- | | | | | | |
| | | | | | tein) | | | | | | |
| 287 | thymosin | 1043 | TETQ- | | N/A | 1970 | KSKLKKTETQ | | N/A | 2881 | EKNPLPSKET |
| | beta-4 | | EKNP | | (end | | | | | | IEQEKQAGES |
| | | | | | of | | | | | | |
| | | | | | pro- | | | | | | |
| | | | | | tein) | | | | | | |
| 288 | thymosin | 1044 | TQEK- | | N/A | 1971 | KLKKTETQEK | | N/A | 2882 | NPLPSKETIE |
| | beta-4 | | NPLP | | (end | | | | | | QEKQAGES |
| | | | | | of | | | | | | |
| | | | | | pro- | | | | | | |
| | | | | | tein) | | | | | | |
| 289 | hapto- | 1045 | PVQR- | 1491 | MVSH- | 1972 | PKNPANPVQR | 2401 | ILGGHLDAKGSF | 2883 | HNLTTGATLI |
| | globin | | ILGG | | HNLT | | | | PWQAKMVSH | | |
| 290 | hapto- | 1046 | PVQR- | 1492 | VSHH- | 1973 | PKNPANPVQR | 2402 | ILGGHLDAKGSF | 2884 | NLTTGATLIN |
| | globin | | ILGG | | NLTT | | | | PWQAKMVSHH | | |
| 291 | hapto- | 1047 | GVYV- | | N/A | 1974 | CAVAEYGVYV | | N/A | 2885 | KVTSIQDWVQ |
| | globin | | KVTS | | (end | | | | | | KTIAEN |
| | | | | | of | | | | | | |
| | | | | | pro- | | | | | | |
| | | | | | tein) | | | | | | |
| 292 | hapto- | 1048 | PVQR- | 1493 | AKMV- | 1975 | PKNPANPVQR | 2403 | ILGGHLDAKGSF | 2886 | SHHNLTTGAT |
| | globin | | ILGG | | SHHN | | | | PWQAKMV | | |
| 293 | hapto- | 1049 | PVQR- | 1494 | FPWQ- | 1976 | PKNPANPVQR | 2404 | ILGGHLDAKGSF | 2887 | AKMVSHHNLT |
| | globin | | ILGG | | AKMV | | | | PWQ | | |
| 294 | hapto- | 1050 | SALG- | 1495 | LWGQ- | 1977 | MSALG | 2405 | AVIALLLWGQ | 2888 | LFAVDSGNDV |
| | globin | | AVIA | | LFAV | | | | | | |
| 295 | hapto- | 1051 | MSAL- | 1496 | LWGQ- | 1978 | MSAL | 2406 | GAVIALLLWGQ | 2889 | LFAVDSGNDV |
| | globin | | GAVI | | LFAV | | | | | | |
| 296 | hemoglobin | 1052 | HCLL- | | N/A | 1979 | NFKLLSHCLL | | N/A | 2890 | VTLAAHLPAE |
| | subunit | | VTLA | | (end | | | | | | FTPAVHASLD |
| | alpha | | | | of | | | | | | KFLASVSTVL |
| | | | | | pro- | | | | | | TSKYR |
| | | | | | tein) | | | | | | |
| 297 | hemoglobin | 1053 | LLVT- | | N/A | 1980 | KLLSHCLLVT | | N/A | 2891 | LAAHLPAEFT |
| | subunit | | LAAH | | (end | | | | | | PAVHASLDKF |
| | alpha | | | | of | | | | | | LASVSTVLTS |
| | | | | | pro- | | | | | | KYR |
| | | | | | tein) | | | | | | |
| 298 | hemoglobin | 1054 | M- | 1497 | LERM- | | N/A | 2407 | VLSPADKTNVKA | 2892 | FLSFPTTKTY |
| | subunit | | VLSP | | FLSF | | | | AWGKVGAHAGEY | | |
| | alpha | | | | | | | | GAEALERM | | |
| 299 | hemoglobin | 1055 | M- | 1498 | ERMF- | | N/A | 2408 | VLSPADKTNVKA | 2893 | LSFPTTKTYF |
| | subunit | | VLSP | | LSFP | | | | AWGKVGAHAGEY | | |
| | alpha | | | | | | | | GAEALERMF | | |
| 300 | hemoglobin | 1056 | ASLD- | | N/A | 1981 | FTPAVHASLD | | N/A | 2894 | KFLASVSTVL |
| | subunit | | KFLA | | (end | | | | | | TSKYR |
| | alpha | | | | of | | | | | | |
| | | | | | pro- | | | | | | |
| | | | | | tein) | | | | | | |
| 301 | hemoglobin | 1057 | LVTL- | | N/A | 1982 | LLSHCLLVTL | | N/A | 2895 | AAHLPAEFTP |
| | subunit | | AAHL | | (end | | | | | | AVHASLDKFL |
| | alpha | | | | of | | | | | | ASVSTVLTSK |
| | | | | | pro- | | | | | | YR |
| | | | | | tein) | | | | | | |
| 302 | hemoglobin | 1058 | M- | 1499 | FLSF- | | N/A | 2409 | VLSPADKTNVKA | 2896 | PTTKTYFPHF |
| | subunit | | VLSP | | PTTK | | | | AWGKVGAHAGEY | | |
| | alpha | | | | | | | | GAEALERMFLSF | | |
| 303 | hemoglobin | 1059 | M- | 1500 | GKVG- | | N/A | 2410 | VLSPADKTNVKA | 2897 | AHAGEYGAEA |
| | subunit | | VLSP | | AHAG | | | | AWGKVG | | |
| | alpha | | | | | | | | | | |
| 304 | caveolae- | 1060 | QKVR- | | N/A | 1983 | VALEQAQKVR | | N/A | 2898 | YEGSYALTSE |
| | associated | | YEGS | | (end | | | | | | EAERSDGDPV |
| | protein 2 | | | | of | | | | | | QPAVLQVHQT |
| | | | | | pro- | | | | | | S |
| | | | | | tein) | | | | | | |
| 305 | caveolae- | 1061 | M- | 1501 | SDMR- | | N/A | 2411 | GEDAAQAEKFQH | 2899 | QEKPSSPSPM |
| | associated | | GEDA | | QEKP | | | | PGSDMR | | |
| | protein 2 | | | | | | | | | | |
| 306 | caveolae- | 1062 | EGSY- | | N/A | 1984 | AQKVRYEGSY | | N/A | 2900 | ALTSEEAERS |
| | associated | | ALTS | | (end | | | | | | DGDPVQPAVL |
| | protein 2 | | | | of | | | | | | QVHQTS |
| | | | | | pro- | | | | | | |
| | | | | | tein) | | | | | | |
| 307 | caveolae- | 1063 | M- | 1502 | QHPG- | | N/A | 2412 | GEDAAQAEKFQH | 2901 | SDMRQEKPSS |
| | associated | | GEDA | | SDMR | | | | PG | | |
| | protein 2 | | | | | | | | | | |
| 308 | caveolae- | 1064 | M- | 1503 | GSDM- | | N/A | 2413 | GEDAAQAEKFQH | 2902 | RQEKPSSPSP |
| | associated | | GEDA | | RQEK | | | | PGSDM | | |
| | protein 2 | | | | | | | | | | |
| 309 | caveolae- | 1065 | RYEG- | | N/A | 1985 | EQAQKVRYEG | | N/A | 2903 | SYALTSEEAE |
| | associated | | SYAL | | (end | | | | | | RSDGDPVQPA |
| | protein 2 | | | | of | | | | | | VLQVHQTS |
| | | | | | pro- | | | | | | |
| | | | | | tein) | | | | | | |
| 310 | alpha-2- | 1066 | PPLG- | 1504 | HVLL- | 1986 | PDAPPSPPLG | 2414 | APGLPPAGSPPD | 2904 | AAPPGHQLHR |
| | HS-glyco- | | APGL | | AAPP | | | | SHVLL | | |
| | protein | | | | | | | | | | |
| 311 | alpha-2- | 1067 | RKTR- | | N/A | 1987 | GEVSHPRKTR | | N/A | 2905 | TVVQPSVGAA |
| | HS-glyco- | | TVVQ | | (end | | | | | | AGPVVPPCPG |
| | protein | | | | of | | | | | | RIRHFKV |
| | | | | | pro- | | | | | | |
| | | | | | tein) | | | | | | |
| 312 | alpha-2- | 1068 | PPLG- | 1505 | VLLA- | 1988 | PDAPPSPPLG | 2415 | APGLPPAGSPPD | 2906 | APPGHQLHRA |
| | HS-glyco- | | APGL | | APPG | | | | SHVLLA | | |
| | protein | | | | | | | | | | |
| 313 | alpha-2- | 1069 | HVLL- | 1506 | PRKT- | 1989 | GSPPDSHVLL | 2416 | AAPPGHQLHRAH | 2907 | RTVVQPSVGA |
| | HS-glyco- | | AAPP | | RTVV | | | | YDLRHTFMGVVS | | |
| | protein | | | | | | | | LGSPSGEVSHPR | | |
| | | | | | | | | | KT | | |
| 314 | alpha-2- | 1070 | PPLG- | 1507 | PRKT- | 1990 | PDAPPSPPLG | 2417 | APGLPPAGSPPD | 2908 | RTVVQPSVGA |
| | HS-glyco- | | APGL | | RTVV | | | | SHVLLAAPPGHQ | | |
| | protein | | | | | | | | LHRAHYDLRHTF | | |
| | | | | | | | | | MGVVSLGSPSGE | | |
| | | | | | | | | | VSHPRKT | | |
| 315 | alpha-2- | 1071 | VLLA- | 1508 | PRKT- | 1991 | SPPDSHVLLA | 2418 | APPGHQLHRAHY | 2909 | RTVVQPSVGA |
| | HS-glyco- | | APPG | | RTVV | | | | DLRHTFMGVVSL | | |
| | protein | | | | | | | | GSPSGEVSHPRK | | |
| | | | | | | | | | T | | |
| 316 | alpha-2- | 1072 | PPLG- | 1509 | SHVL- | 1992 | PDAPPSPPLG | 2419 | APGLPPAGSPPD | 2910 | LAAPPGHQLH |
| | HS-glyco- | | APGL | | LAAP | | | | SHVL | | |
| | protein | | | | | | | | | | |
| 317 | alpha-2- | 1073 | HVLL- | 1510 | SHPR- | 1993 | GSPPDSHVLL | 2420 | AAPPGHQLHRAH | 2911 | KTRTVVQPSV |
| | HS-glyco- | | AAPP | | KTRT | | | | YDLRHTFMGVVS | | |
| | protein | | | | | | | | LGSPSGEVSHPR | | |
| 318 | chromo- | 1074 | QQKK- | 1511 | KDVM- | 1994 | AKERAHQQKK | 2421 | HSGFEDELSEVL | 2912 | EKREDSKEAE |
| | granin-A | | HSGF | | EKRE | | | | ENQSSQAELKEA | | |
| | | | | | | | | | VEEPSSKDVM | | |
| 319 | chromo- | 1075 | QQKK- | 1512 | DVME- | 1995 | AKERAHQQKK | 2422 | HSGFEDELSEVL | 2913 | KREDSKEAEK |
| | granin-A | | HSGF | | KRED | | | | ENQSSQAELKEA | | |
| | | | | | | | | | VEEPSSKDVME | | |
| 320 | chromo- | 1076 | LQVR- | 1513 | ALRR- | 1996 | LEAGLPLQVR | 2423 | GYPEEKKEEEGS | | N/A |
| | granin-A | | GYPE | | G | | | | ANRRPEDQELES | | |
| | | | | | | | | | LSAIEAELEKVA | | |
| | | | | | | | | | HQLQALRR | | |
| 321 | chromo- | 1077 | QQKK- | 1514 | KDVM- | 1997 | AKERAHQQKK | 2424 | HSGFEDELSEVL | 2914 | EKREDSKEAE |
| | granin-A | | HSGF | | EKRE | | | | ENQSSQAELKEA | | |
| | | | | | | | | | VEEPSSKDVM | | |
| 322 | chromo- | 1078 | AEKR- | 1515 | GPQL- | 1998 | LAKELTAEKR | 2425 | LEGQEEEEDNRD | 2915 | RRGWRPSSRE |
| | granin-A | | LEGQ | | RRGW | | | | SSMKLSFRARAY | | |
| | | | | | | | | | GFRGPGPQL | | |
| 323 | chromo- | 1079 | AEKR- | 1516 | KLSF- | 1999 | LAKELTAEKR | 2426 | LEGQEEEEDNRD | 2916 | RARAYGFRGP |
| | granin-A | | LEGQ | | RARA | | | | SSMKLSF | | |
| 324 | complement | 1080 | LPSR- | 1517 | SLLR- | 2000 | LDVSLQLPSR | 2427 | SSKITHRIHWES | 2917 | SEETKENEGF |
| | C3 | | SSKI | | SEET | | | | ASLLR | | |
| 325 | complement | 1081 | LPSR- | 1518 | ASLL- | 2001 | LDVSLQLPSR | 2428 | SSKITHRIHWES | 2918 | RSEETKENEG |
| | C3 | | SSKI | | RSEE | | | | ASLL | | |
| 326 | complement | 1082 | SSKI- | 1519 | ASLL- | 2002 | LQLPSRSSKI | 2429 | THRIHWESASLL | 2919 | RSEETKENEG |
| | C3 | | THRI | | RSEE | | | | | | |
| 327 | complement | 1083 | SRSS- | 1520 | ASLL- | 2003 | VSLQLPSRSS | 2430 | KITHRIHWESAS | 2920 | RSEETKENEG |
| | C3 | | KITH | | RSEE | | | | LL | | |
| 328 | complement | 1084 | LALG- | 1521 | HDAQ- | 2004 | LLTHLPLALG | 2431 | SPMYSIITPNIL | 2921 | GDVPVTVTVH |
| | C3 | | SPMY | | GDVP | | | | RLESEETMVLEA | | |
| | | | | | | | | | HDAQ | | |
| 329 | complement | 1085 | KITH- | 1522 | ASLL- | 2005 | LPSRSSKITH | 2432 | RIHWESASLL | 2922 | RSEETKENEG |
| | C3 | | RIHW | | RSEE | | | | | | |
| 330 | complement | 1086 | SKIT- | 1523 | ASLL- | 2006 | QLPSRSSKIT | 2433 | HRIHWESASLL | 2923 | RSEETKENEG |
| | C3 | | HRIH | | RSEE | | | | | | |
| 331 | complement | 1087 | THRI - | 1524 | ASLL- | 2007 | SRSSKITHRI | 2434 | HWESASLL | 2924 | RSEETKENEG |
| | C3 | | HWES | | RSEE | | | | | | |
| 332 | complement | 1088 | ITHR- | 1525 | ASLL- | 2008 | PSRSSKITHR | 2435 | IHWESASLL | 2925 | RSEETKENEG |
| | C3 | | IHWE | | RSEE | | | | | | |
| 333 | vitronec- | 1089 | FWGR- | 1526 | PSLA- | 2009 | DIFELLEWGR | 2436 | TSAGTRQPQFIS | 2926 | KKQRFRHRNR |
| | tin | | TSAG | | KKQR | | | | RDWHGVPGQVDA | | |
| | | | | | | | | | AMAGRIYISGMA | | |
| | | | | | | | | | PRPSLA | | |
| 334 | vitronec- | 1090 | TSAG- | 1527 | IYIS- | 2010 | LLFWGRTSAG | 2437 | TRQPQFISRDWH | 2927 | GMAPRPSLAK |
| | tin | | TRQP | | GMAP | | | | GVPGQVDAAMAG | | |
| | | | | | | | | | RIYIS | | |
| 335 | vitronec- | 1091 | LTSD- | 1528 | KPEG- | 2011 | QVGGPSLTSD | 2438 | LQAQSKGNPEQT | 2928 | IDSRPETLHP |
| | tin | | LQAQ | | IDSR | | | | PVLKPEEEAPAP | | |
| | | | | | | | | | EVGASKPEG | | |
| 336 | vitronec- | 1092 | FELL- | 1529 | PSLA- | 2012 | DSWEDIFELL | 2439 | FWGRTSAGTRQP | 2929 | KKQRFRHRNR |
| | tin | | FWGR | | KKQR | | | | QFISRDWHGVPG | | |
| | | | | | | | | | QVDAAMAGRIYI | | |
| | | | | | | | | | SGMAPRPSLA | | |
| 337 | vitronec- | 1093 | TSAG- | 1530 | APRP- | 2013 | LLFWGRTSAG | 2440 | TRQPQFISRDWH | 2930 | SLAKKQRFRH |
| | tin | | TRQP | | SLAK | | | | GVPGQVDAAMAG | | |
| | | | | | | | | | RIYISGMAPRP | | |
| 338 | vitronec- | 1094 | FWGR- | 1531 | PSLA- | 2014 | DIFELLFWGR | 2441 | TSAGTRQPQFIS | 2931 | KKQRFRHRNR |
| | tin | | TSAG | | KKQR | | | | RDWHGVPGQVDA | | |
| | | | | | | | | | AMAGRIYISGMA | | |
| | | | | | | | | | PRPSLA | | |
| 339 | vitronec- | 1095 | FELL- | 1532 | PRPS- | 2015 | DSWEDIFELL | 2442 | FWGRTSAGTRQP | 2932 | LAKKQRFRHR |
| | tin | | FWGR | | LAKK | | | | QFISRDWHGVPG | | |
| | | | | | | | | | QVDAAMAGRIYI | | |
| | | | | | | | | | SGMAPRPS | | |
| 340 | hemopexin | 1096 | QGHN- | 1533 | KLLQ- | 2016 | VDAAFRQGHN | 2443 | SVFLIKGDKVWV | 2933 | DEFPGIPSPL |
| | OR | | SVFL | | DEFP | | | | YPPEKKEKGYPK | | |
| | epididymis | | | | | | | | LLQ | | |
| | secretory | | | | | | | | | | |
| | sperm | | | | | | | | | | |
| | binding | | | | | | | | | | |
| | protein | | | | | | | | | | |
| 341 | hemopexin | 1097 | QGHN- | 1534 | PPEK- | 2017 | VDAAFRQGHN | 2444 | SVFLIKGDKVWV | 2934 | KEKGYPKLLQ |
| | OR | | SVFL | | KEKG | | | | YPPEK | | |
| | epididymis | | | | | | | | | | |
| | secretory | | | | | | | | | | |
| | sperm | | | | | | | | | | |
| | binding | | | | | | | | | | |
| | protein | | | | | | | | | | |
| 342 | hemopexin | 1098 | QGHN- | 1535 | EKKE- | 2018 | VDAAFRQGHN | 2445 | SVFLIKGDKVWV | 2935 | KGYPKLLQDE |
| | OR | | SVFL | | KGYP | | | | YPPEKKE | | |
| | epididymis | | | | | | | | | | |
| | secretory | | | | | | | | | | |
| | sperm | | | | | | | | | | |
| | binding | | | | | | | | | | |
| | protein | | | | | | | | | | |
| 343 | hemopexin | 1099 | RWKN- | 1536 | QGHN- | 2019 | RELISERWKN | 2446 | FPSPVDAAFRQG | 2936 | SVFLIKGDKV |
| | OR | | FPSP | | SVFL | | | | HN | | |
| | epididymis | | | | | | | | | | |
| | secretory | | | | | | | | | | |
| | sperm | | | | | | | | | | |
| | binding | | | | | | | | | | |
| | protein | | | | | | | | | | |
| 344 | hemopexin | 1100 | QGHN- | 1537 | YPPE- | 2020 | VDAAFRQGHN | 2447 | SVFLIKGDKVWV | 2937 | KKEKGYPKLL |
| | OR | | SVFL | | KKEK | | | | YPPE | | |
| | epididymis | | | | | | | | | | |
| | secretory | | | | | | | | | | |
| | sperm | | | | | | | | | | |
| | binding | | | | | | | | | | |
| | protein | | | | | | | | | | |
| 345 | hemopexin | 1101 | DKVW- | 1538 | KLLQ- | 2021 | VFLIKGDKVW | 2448 | VYPPEKKEKGYP | 2938 | DEFPGIPSPL |
| | OR | | VYPP | | DEFP | | | | KLLQ | | |
| | epididymis | | | | | | | | | | |
| | secretory | | | | | | | | | | |
| | sperm | | | | | | | | | | |
| | binding | | | | | | | | | | |
| | protein | | | | | | | | | | |
| 346 | zyxin | 1102 | QTQF- | 1539 | QSQT- | 2022 | PAPAQSQTQF | 2449 | HVQPQPQPKPQV | 2939 | QPVSLANTQP |
| | | | HVQP | | QPVS | | | | QLHVQSQT | | |
| 347 | zyxin | 1103 | QPVS- | 1540 | PVAS- | 2023 | HVQSQTQPVS | 2450 | LANTQPRGPPAS | 2940 | KFSPGAPGGS |
| | | | LANT | | KFSP | | | | SPAPAPKFSPVT | | |
| | | | | | | | | | PKFTPVAS | | |
| 348 | zyxin | 1104 | QTQF- | 1541 | LHVQ- | 2024 | PAPAQSQTQF | 2451 | HVQPQPQPKPQV | 2941 | SQTQPVSLAN |
| | | | HVQP | | SQTQ | | | | QLHVQ | | |
| 349 | zyxin | 1105 | M- | 1542 | APAF- | | N/A | 2452 | AAPRPSPAISVS | 2942 | YAPQKKFGPV |
| | | | AAPR | | YAPQ | | | | VSAPAF | | |
| 350 | zyxin | 1106 | QTQF- | 1543 | QPVS- | 2025 | PAPAQSQTQF | 2453 | HVQPQPQPKPQV | 2943 | LANTQPRGPP |
| | | | HVQP | | LANT | | | | QLHVQSQTQPVS | | |
| 351 | zyxin | 1107 | PKPK- | 1544 | QRAQ- | 2026 | FGPVVAPKPK | 2454 | VNPFRPGDSEPP | 2944 | MGRVGEIPPP |
| | | | VNPF | | MGRV | | | | PAPGAQRAQ | | |
| 352 | apolipo- | 1108 | SARA- | 1545 | TAKD- | 2027 | LLALLASARA | 2455 | SEAEDASLLSFM | 2945 | ALSSVQESQV |
| | protein | | SEAE | | ALSS | | | | QGYMKHATKTAK | | |
| | C-III | | | | | | | | D | | |
| 353 | apolipo- | 1109 | SARA- | 1546 | TKTA- | 2028 | LLALLASARA | 2456 | SEAEDASLLSFM | 2946 | KDALSSVQES |
| | protein | | SEAE | | KDAL | | | | QGYMKHATKTA | | |
| | C-III | | | | | | | | | | |
| 354 | apolipo- | 1110 | FSEF- | | N/A | 2029 | STVKDKFSEF | | N/A | 2947 | WDLDPEVRPT |
| | protein | | WDLD | | (end | | | | | | SAVAA |
| | C-III | | | | of | | | | | | |
| | | | | | pro- | | | | | | |
| | | | | | tein) | | | | | | |
| 355 | apolipo- | 1111 | SARA- | 1547 | AQQA- | 2030 | LLALLASARA | 2457 | SEAEDASLLSFM | 2948 | RGWVTDGFSS |
| | protein | | SEAE | | RGWV | | | | QGYMKHATKTAK | | |
| | C-III | | | | | | | | DALSSVQESQVA | | |
| | | | | | | | | | QQA | | |
| 356 | apolipo- | 1112 | WDLD- | | N/A | 2031 | DKFSEFWDLD | | N/A | 2949 | PEVRPTSAVA |
| | protein | | PEVR | | (end | | | | | | A |
| | | | | | of | | | | | | |
| | | | | | pro- | | | | | | |
| | | | | | tein) | | | | | | |
| 357 | secreto- | 1113 | KRFP- | 1548 | EHIA- | 2032 | KLAPVSKRFP | 2458 | VGPPKNDDTPNR | 2950 | KRAMENM |
| | granin-2 | | VGPP | | KRAM | | | | QYWDEDLLMKVL | | |
| | | | | | | | | | EYLNQEKAEKGR | | |
| | | | | | | | | | EHIA | | |
| 358 | secreto- | 1114 | VSKR- | 1549 | EHIA- | 2033 | TDKLAPVSKR | 2459 | FPVGPPKNDDTP | 2951 | KRAMENM |
| | granin-2 | | FPVG | | KRAM | | | | NRQYWDEDLLMK | | |
| | | | | | | | | | VLEYLNQEKAEK | | |
| | | | | | | | | | GREHIA | | |
| 359 | secreto- | 1115 | KRFP- | 1550 | GREH- | 2034 | KLAPVSKRFP | 2460 | VGPPKNDDTPNR | 2952 | IAKRAMENM |
| | granin-2 | | VGPP | | IAKR | | | | QYWDEDLLMKVL | | |
| | | | | | | | | | EYLNQEKAEKGR | | |
| | | | | | | | | | EH | | |
| 360 | secreto- | 1116 | KRVP- | 1551 | APVS- | 2035 | INSNQVKRVP | 2461 | GQGSSEDDLQEE | 2953 | KRFPVGPPKN |
| | granin-2 | | GQGS | | KRFP | | | | EQIEQAIKEHLN | | |
| | | | | | | | | | QGSSQETDKLAP | | |
| | | | | | | | | | VS | | |
| 361 | secreto- | 1117 | QVKR- | 1552 | APVS- | 2036 | EIINSNQVKR | 2462 | VPGQGSSEDDLQ | 2954 | KRFPVGPPKN |
| | granin-2 | | VPGQ | | KRFP | | | | EEEQIEQAIKEH | | |
| | | | | | | | | | LNQGSSQETDKL | | |
| | | | | | | | | | APVS | | |
| 362 | secreto- | 1118 | PKTP- | 1553 | DGLS- | 2037 | LSKSGYPKTP | 2463 | GRAGTEALPDGL | 2955 | VEDILNLLGM |
| | granin-2 | | GRAG | | VEDI | | | | S | | |
| 363 | secreto- | 1119 | ERKL- | 1554 | PMYE- | 2038 | ETQQWPERKL | 2464 | KHMQFPPMYE | 2956 | ENSRDNPFKR |
| | granin-2 | | KHMQ | | ENSR | | | | | | |
| 364 | angioten- | 1120 | QQLN- | | N/A | 2039 | EPTESTQQLN | | N/A | 2957 | KPEVLEVTLN |
| | sinogen | | KPEV | | (end | | | | | | RPFLFAVYDQ |
| | | | | | of | | | | | | SATALHFLGR |
| | | | | | pro- | | | | | | VANPLSTA |
| | | | | | tein) | | | | | | |
| 365 | angioten- | 1121 | EPTE- | | N/A | 2040 | LEADEREPTE | | N/A | 2958 | STQQLNKPEV |
| | sinogen | | STQQ | | (end | | | | | | LEVTLNRPFL |
| | | | | | of | | | | | | FAVYDQSATA |
| | | | | | pro- | | | | | | LHFLGRVAN |
| | | | | | tein) | | | | | | PLSTA |
| 366 | angioten- | 1122 | TEST- | | N/A | 2041 | ADEREPTEST | | N/A | 2959 | QQLNKPEVLE |
| | sinogen | | QQLN | | (end | | | | | | VTLNRPFLFA |
| | | | | | of | | | | | | VYDQSATALH |
| | | | | | pro- | | | | | | FLGRVANPLS |
| | | | | | tein) | | | | | | TA |
| 367 | c-reactive | 1123 | HAFG- | 1555 | VSLK- | 2042 | VLTSLSHAFG | 2465 | QTDMSRKAFVFP | 2960 | APLTKPLKAF |
| | protein | | QTDM | | APLT | | | | KESDTSYVSLK | | |
| 368 | c-reactive | 1124 | HAFG- | 1556 | APLT- | 2043 | VLTSLSHAFG | 2466 | QTDMSRKAFVFP | 2961 | KPLKAFTVCL |
| | protein | | QTDM | | KPLK | | | | KESDTSYVSLKA | | |
| | | | | | | | | | PLT | | |
| 369 | c-reactive | 1125 | HAFG- | 1557 | SYVS- | 2044 | VLTSLSHAFG | 2467 | QTDMSRKAFVFP | 2962 | LKAPLTKPLK |
| | protein | | QTDM | | LKAP | | | | KESDTSYVS | | |
| 370 | serum | 1126 | VFRR- | 1558 | QYLQ- | 2045 | SAYSRGVFRR | 2468 | DAHKSEVAHRFK | 2963 | QCPFEDHVKL |
| | albumin | | DAHK | | QCPF | | | | DLGEENFKALVL | | |
| | | | | | | | | | IAFAQYLQ | | |
| 371 | serum | 1127 | VFRR- | 1559 | ENFK- | 2046 | SAYSRGVFRR | 2469 | DAHKSEVAHRFK | 2964 | ALVLIAFAQY |
| | albumin | | DAHK | | ALVL | | | | DLGEENFK | | |
| 372 | serum | 1128 | VFRR- | 1560 | ALVL- | 2047 | SAYSRGVFRR | 2470 | DAHKSEVAHRFK | 2965 | IAFAQYLQQC |
| | albumin | | DAHK | | IAFA | | | | DLGEENFKALVL | | |
| 373 | trans- | 1129 | GLQM- | | N/A | 2048 | EGKNVIGLQM | | N/A | 2966 | GTNRGASQAG |
| | gelin-2 | | GTNR | | (end | | | | | | MTGYGMPRQI |
| | | | | | of | | | | | | L |
| | | | | | pro- | | | | | | |
| | | | | | tein) | | | | | | |
| 374 | trans- | 1130 | IGLQ- | | N/A | 2049 | QEGKNVIGLQ | | N/A | 2967 | MGTNRGASQA |
| | gelin-2 | | MGTN | | (end | | | | | | GMTGYGMPRQ |
| | | | | | of | | | | | | IL |
| | | | | | pro- | | | | | | |
| | | | | | tein) | | | | | | |
| 375 | trans- | 1131 | QAGM- | | N/A | 2050 | TNRGASQAGM | | N/A | 2968 | TGYGMPRQIL |
| | gelin-2 | | TGYG | | (end | | | | | | |
| | | | | | of | | | | | | |
| | | | | | pro- | | | | | | |
| | | | | | tein) | | | | | | |
| 376 | pancreatic | 1132 | YGKR- | 1561 | AVPR- | 2051 | MLTRPRYGKR | 2471 | HKEDTLAFSEWG | 2969 | ELSPLDL |
| | prohormone | | HKED | | ELSP | | | | SPHAAVPR | | |
| 377 | pancreatic | 1133 | QGAP- | 1562 | LRRY- | 2052 | QPLLGAQGAP | 2472 | LEPVYPGDNATP | 2970 | INMLTRPRYG |
| | prohormone | | LEPV | | INML | | | | EQMAQYAADLRR | | |
| | | | | | | | | | Y | | |
| 378 | pancreatic | 1134 | PLLG- | 1563 | RPRY- | 2053 | VALLLQPLLG | 2473 | AQGAPLEPVYPG | 2971 | GKRHKEDTLA |
| | prohormone | | AQGA | | GKRH | | | | DNATPEQMAQYA | | |
| | | | | | | | | | ADLRRYINMLTR | | |
| | | | | | | | | | PRY | | |
| 379 | pancreatic | 1135 | QGAP- | 1564 | RPRY- | 2054 | QPLLGAQGAP | 2474 | LEPVYPGDNATP | 2972 | GKRHKEDTLA |
| | prohormone | | LEPV | | GKRH | | | | EQMAQYAADLRR | | |
| | | | | | | | | | YINMLTRPRY | | |
| 380 | neurosec- | 1136 | AAPP- | 1565 | VRGA- | 2055 | LINGLGAAPP | 2475 | GRPEAQPPPLSS | 2973 | RNSEPQDEGE |
| | retory | | GRPE | | RNSE | | | | EHKEPVAGDAVP | | |
| | protein | | | | | | | | GPKDGSAPEVRG | | |
| | VGF | | | | | | | | A | | |
| 381 | neurosec- | 1137 | AAPP- | 1566 | APEV- | 2056 | LINGLGAAPP | 2476 | GRPEAQPPPLSS | 2974 | RGARNSEPQD |
| | retory | | GRPE | | RGAR | | | | EHKEPVAGDAVP | | |
| | protein | | | | | | | | GPKDGSAPEV | | |
| | VGF | | | | | | | | | | |
| 382 | neurosec- | 1138 | GLGA- | 1567 | VRGA- | 2057 | CLLLINGLGA | 2477 | APPGRPEAQPPP | 2975 | RNSEPQDEGE |
| | retory | | APPG | | RNSE | | | | LSSEHKEPVAGD | | |
| | protein | | | | | | | | AVPGPKDGSAPE | | |
| | VGF | | | | | | | | VRGA | | |
| 383 | neurosec- | 1139 | RKKN- | 1568 | PTHV- | 2058 | VEEKRKRKKN | 2478 | APPEPVPPPRAA | 2976 | RSPQPPPPAP |
| | retory | | APPE | | RSPQ | | | | PAPTHV | | |
| | protein | | | | | | | | | | |
| | VGF | | | | | | | | | | |
| 384 | neurosec- | 1140 | KRKK- | 1569 | PTHV- | 2059 | EVEEKRKRKK | 2479 | NAPPEPVPPPRA | 2977 | RSPQPPPPAP |
| | retory | | NAPP | | RSPQ | | | | APAPTHV | | |
| | protein | | | | | | | | | | |
| | VGF | | | | | | | | | | |
| 385 | neurosec- | 1141 | GLGA- | 1570 | APEV- | 2060 | CLLLINGLGA | 2480 | APPGRPEAQPPP | 2978 | RGARNSEPQD |
| | retory | | APPG | | RGAR | | | | LSSEHKEPVAGD | | |
| | protein | | | | | | | | AVPGPKDGSAPE | | |
| | VGF | | | | | | | | V | | |
| 386 | neurosec- | 1142 | EEEA- | 1571 | LTET- | 2061 | GSQQGPEEEA | 2481 | AEALLTET | 2979 | VRSQTHSLPA |
| | retory | | AEAL | | VRSQ | | | | | | |
| | protein | | | | | | | | | | |
| | VGF | | | | | | | | | | |
| 387 | neurosec- | 1143 | KRKK- | 1572 | ELPD- | 2062 | EVEEKRKRKK | 2482 | NAPPEPVPPPRA | 2980 | WNEVLPPWDR |
| | retory | | NAPP | | WNEV | | | | APAPTHVRSPQP | | |
| | protein | | | | | | | | PPPAPAPARDEL | | |
| | VGF | | | | | | | | PD | | |
| 388 | cerulo- | 1144 | LLHC- | 1573 | EDTK- | 2063 | RTPGIWLLHC | 2483 | HVTDHIHAGMET | | N/A |
| | plasmin | | HVTD | | SG | | | | TYTVLQNEDTK | | |
| 389 | cerulo- | 1145 | PAWA- | 1574 | WDYA- | 2064 | LFLCSTPAWA | 2484 | KEKHYYIGIIET | 2981 | SDHGEKKLIS |
| | plasmin | | KEKH | | SDHG | | | | TWDYA | | |
| 390 | PDZ and | 1146 | PFTA- | 1575 | TNQY- | 2065 | HNRSAMPFTA | 2485 | SPASSTTARVIT | 2982 | NNPAGLYSSE |
| | LIM | | SPAS | | NNPA | | | | NQY | | |
| | domain | | | | | | | | | | |
| | protein 1 | | | | | | | | | | |
| 391 | PDZ and | 1147 | LVLQ- | 1576 | APVT- | 2066 | KQSTSFLVLQ | 2486 | EILESEEKGDPN | 2983 | KVAASIGNAQ |
| | LIM | | EILE | | KVAA | | | | KPSGFRSVKAPV | | |
| | domain | | | | | | | | T | | |
| | protein 1 | | | | | | | | | | |
| 392 | PDZ and | 1148 | TNQY- | 1577 | SGVE- | 2067 | TTARVITNQY | 2487 | NNPAGLYSSENI | 2984 | ANSRPLDHAQ |
| | LIM | | NNPA | | ANSR | | | | SNFNNALESKTA | | |
| | domain | | | | | | | | ASGVE | | |
| | protein 1 | | | | | | | | | | |
| 393 | tubulin | 1149 | FPLA- | 1578 | YHEQ- | 2068 | PYPRIHFPLA | 2488 | TYAPVISAEKAY | 2985 | LSVAEITNAC |
| | alpha-4A | | TYAP | | LSVA | | | | HEQ | | |
| | chain | | | | | | | | | | |
| 394 | tubulin | 1150 | FPLA- | 1579 | HEQL- | 2069 | PYPRIHFPLA | 2489 | TYAPVISAEKAY | 2986 | SVAEITNACE |
| | alpha-4A | | TYAP | | SVAE | | | | HEQL | | |
| | chain | | | | | | | | | | |
| 395 | tubulin | 1151 | PVIS- | 1580 | EITN- | 2070 | PLATYAPVIS | 2490 | AEKAYHEQLSVA | 2987 | ACFEPANQMV |
| | alpha-4A | | AEKA | | ACFE | | | | EITN | | |
| | chain | | | | | | | | | | |
| 396 | tubulin | 1152 | M- | 1581 | LGRL- | | N/A | 2491 | VHLTPEEKSAVT | 2988 | LVVYPWTQRF |
| | alpha-4A | | VHLT | | LVVY | | | | ALWGKVNVDEVG | | |
| | chain | | | | | | | | GEALGRL | | |
| 397 | tubulin | 1153 | M- | 1582 | TQRF- | | N/A | 2492 | VHLTPEEKSAVT | 2989 | FESFGDLSTP |
| | alpha-4A | | VHLT | | FESF | | | | ALWGKVNVDEVG | | |
| | chain | | | | | | | | GEALGRLLVVYP | | |
| | | | | | | | | | WTQRF | | |
| 398 | tubulin | 1154 | LGRL- | 1583 | TQRF- | 2071 | EVGGEALGRL | 2493 | LVVYPWTQRF | 2990 | FESFGDLSTP |
| | alpha-4A | | LVVY | | FESF | | | | | | |
| | chain | | | | | | | | | | |
| 399 | multi- | 1155 | SLNT- | 1584 | RAPR- | 2072 | SNEQATSLNT | 2494 | VGGTGGIGGVGG | 2991 | ETYLSRGDSS |
| | merin-1 | | VGGT | | ETYL | | | | TGGVGNRAPR | | |
| 400 | multi- | 1156 | LNTV- | 1585 | RAPR- | 2073 | NEQATSLNTV | 2495 | GGTGGIGGVGGT | 2992 | ETYLSRGDSS |
| | merin-1 | | GGTG | | ETYL | | | | GGVGNRAPR | | |
| 401 | multi- | 1157 | SLNT- | 1586 | NRAP- | 2074 | SNEQATSLNT | 2496 | VGGTGGIGGVGG | 2993 | RETYLSRGDS |
| | merin-1 | | VGGT | | RETY | | | | TGGVGNRAP | | |
| 402 | multi- | 1158 | TSLN- | 1587 | RAPR- | 2075 | KSNEQATSLN | 2497 | TVGGTGGIGGVG | 2994 | ETYLSRGDSS |
| | merin-1 | | TVGG | | ETYL | | | | GTGGVGNRAPR | | |
| 403 | inter- | 1159 | EVSG- | 1588 | RRYQ- | 2076 | ICFFLSEVSG | 2498 | FEIPINGLSEFV | 2995 | RSLPGESEEM |
| | alpha- | | FEIP | | RSLP | | | | DYEDLVELAPGK | | |
| | trypsin | | | | | | | | FQLVAENRRYQ | | |
| | inhibitor | | | | | | | | | | |
| | heavy | | | | | | | | | | |
| | chain H2 | | | | | | | | | | |
| 404 | inter- | 1160 | RITR- | 1589 | RMLA- | 2077 | TAAAKRRITR | 2499 | SILQMSLDHHIV | 2996 | DAPPQDPSCC |
| | alpha- | | SILQ | | DAPP | | | | TPLTSLVIENEA | | |
| | trypsin | | | | | | | | GDERMLA | | |
| | inhibitor | | | | | | | | | | |
| | heavy | | | | | | | | | | |
| | chain H2 | | | | | | | | | | |
| 405 | clusterin | 1161 | VTTV- | 1590 | PVEV- | 2078 | DQYYLRVTTV | 2500 | ASHTSDSDVPSG | 2997 | SRKNPKFMET |
| | | | ASHT | | SRKN | | | | VTEVVVKLFDSD | | |
| | | | | | | | | | PITVTVPVEV | | |
| 406 | clusterin | 1162 | KNPK- | | N/A | 2079 | PVEVSRKNPK | | N/A | 2998 | FMETVAEKAL |
| | | | FMET | | (end | | | | | | QEYRKKHREE |
| | | | | | of | | | | | | |
| | | | | | pro- | | | | | | |
| | | | | | tein) | | | | | | |
| 407 | apolipo- | 1163 | PAQG- | | N/A | 2080 | VLEGPAPAQG | | N/A | 2999 | TPDVSSALDK |
| | protein | | TPDV | | (end | | | | | | LKEFGNTLED |
| | C-I | | | | of | | | | | | KARELISRIK |
| | | | | | pro- | | | | | | QSELSAKMRE |
| | | | | | tein) | | | | | | WFSETFQKVK |
| | | | | | | | | | | | EKLKIDS |
| 408 | apolipo- | 1164 | QGTP- | | N/A | 2081 | EGPAPAQGTP | | N/A | 3000 | DVSSALDKLK |
| | protein | | DVSS | | (end | | | | | | EFGNTLEDKA |
| | C-I | | | | of | | | | | | RELISRIKQS |
| | | | | | pro- | | | | | | ELSAKMREWF |
| | | | | | tein) | | | | | | SETFQKVKEK |
| | | | | | | | | | | | LKIDS |
| 409 | fibrinogen | 1165 | QLIK- | 1591 | ATLK- | 2082 | KTSEVKQLIK | 2501 | AIQLTYNPDESS | 3001 | SRKMLEEIMK |
| | gamma | | AIQL | | SRKM | | | | KPNMIDAATLK | | |
| | chain | | | | | | | | | | |
| 410 | fibrinogen | 1166 | EGFG- | 1592 | HLIS- | 2083 | NWIQYKEGFG | 2502 | HLSPTGTTEFWL | 3002 | TQSAIPYALR |
| | gamma | | HLSP | | TQSA | | | | GNEKIHLIS | | |
| | chain | | | | | | | | | | |
| 411 | fibrinogen | 1167 | NRLT- | | N/A | 2084 | MKIIPFNRLT | | N/A | 3003 | IGEGQQHHLG |
| | gamma | | IGEG | | (end | | | | | | GAKQAGDV |
| | chain | | | | of | | | | | | |
| | | | | | pro- | | | | | | |
| | | | | | tein) | | | | | | |
| 412 | N-acetyl- | 1168 | RSRR- | | N/A | 2085 | ARSVSKRSRR | | N/A | 3004 | EPPPRTLPAT |
| | muramoyl- | | EPPP | | (end | | | | | | DLQ |
| | L-alanine | | | | of | | | | | | |
| | amidase | | | | pro- | | | | | | |
| | | | | | tein) | | | | | | |
| 413 | N-acetyl- | 1169 | SRRE- | | N/A | 2086 | RSVSKRSRRE | | N/A | 3005 | PPPRTLPATD |
| | muramoyl- | | PPPR | | (end | | | | | | LQ |
| | L-alanine | | | | of | | | | | | |
| | amidase | | | | pro- | | | | | | |
| | | | | | tein) | | | | | | |
| 414 | immuno- | 1170 | GSVT- | 1593 | PSVS- | 2087 | LLSHCTGSVT | 2503 | SYVLTQPPSVS | 3006 | VAPGQTARIT |
| | globulin | | SYVL | | VAPG | | | | | | |
| | lambda | | | | | | | | | | |
| | variable | | | | | | | | | | |
| | 3-21 | | | | | | | | | | |
| 415 | immuno- | 1171 | SVTS- | 1594 | PSVS- | 2088 | LSHCTGSVTS | 2504 | YVLTQPPSVS | 3007 | VAPGQTARIT |
| | globulin | | YVLT | | VAPG | | | | | | |
| | lambda | | | | | | | | | | |
| | variable | | | | | | | | | | |
| | 3-21 | | | | | | | | | | |
| 416 | histone | 1172 | M- | 1595 | KKKA- | | N/A | 2505 | SETAPAAPAAPA | 3008 | RKSAGAAKRK |
| | H1.4 | | SETA | | RKSA | | | | PAEKTPVKKKA | | |
| 417 | histone | 1173 | M- | 1596 | KTPV- | | N/A | 2506 | SETAPAAPAAPA | 3009 | KKKARKSAGA |
| | H1.4 | | SETA | | KKKA | | | | PAEKTPV | | |
| 418 | histone | 1174 | M- | 1597 | TPVK- | | N/A | 2507 | SETAPAAPAAPA | 3010 | KKARKSAGAA |
| | H1.4 | | SETA | | KKAR | | | | PAEKTPVK | | |
| 419 | adhesion | 1175 | CNHF- | 1598 | RSAS- | 2089 | SETVCLCNHF | 2508 | THFGVLMDLPRS | 3011 | QLDARNTKVL |
| | G-protein | | THFG | | QLDA | | | | AS | | |
| | coupled | | | | | | | | | | |
| | receptor | | | | | | | | | | |
| | G6 | | | | | | | | | | |
| 420 | adhesion | 1176 | CNHF- | 1599 | QLDA- | 2090 | SETVCLCNHF | 2509 | THFGVLMDLPRS | 3012 | RNTKVLTFIS |
| | G-protein | | THFG | | RNTK | | | | ASQLDA | | |
| | coupled | | | | | | | | | | |
| | receptor | | | | | | | | | | |
| | G6 | | | | | | | | | | |
| 421 | immuno- | 1177 | SEAS- | 1600 | PSVS- | 2091 | LTLCTGSEAS | 2510 | YELTQPPSVS | 3013 | VSPGQTARIT |
| | globulin | | YELT | | VSPG | | | | | | |
| | lambda | | | | | | | | | | |
| | variable | | | | | | | | | | |
| | 3-25 | | | | | | | | | | |
| 422 | immuno- | 1178 | GSVA- | 1601 | PSVS- | 2092 | VLAYCTGSVA | 2511 | SYELTQPPSVS | 3014 | VSPGQTASIT |
| | globulin | | SYEL | | VSPG | | | | | | |
| | lambda | | | | | | | | | | |
| | variable | | | | | | | | | | |
| | 3-25 | | | | | | | | | | |
| 423 | immuno- | 1179 | SWAQ- | 1602 | PSVS- | 2093 | LIHCTGSWAQ | 2512 | SVLTQPPSVS | 3015 | AAPGQKVTIS |
| | globulin | | SVLT | | AAPG | | | | | | |
| | lambda | | | | | | | | | | |
| | variable | | | | | | | | | | |
| | 1-51 | | | | | | | | | | |
| 424 | immuno- | 1180 | QSVL- | 1603 | PSVS- | 2094 | CTGSWAQSVL | 2513 | TQPPSVS | 3016 | AAPGQKVTIS |
| | globulin | | TQPP | | AAPG | | | | | | |
| | lambda | | | | | | | | | | |
| | variable | | | | | | | | | | |
| | 1-51 | | | | | | | | | | |
| 425 | immuno- | 1181 | GSWA- | 1604 | PSVS- | 2095 | LITHCAGSWA | 2514 | QSVLTQPPSVS | 3017 | EAPRQRVTIS |
| | globulin | | QSVL | | EAPR | | | | | | |
| | lambda | | | | | | | | | | |
| | variable | | | | | | | | | | |
| | 1-36 | | | | | | | | | | |
| 426 | immuno- | 1182 | SWAQ- | 1605 | PSVS- | 2096 | LITHCAGSWA | 2515 | SVLTQPPSVS | 3018 | EAPRQRVTIS |
| | globulin | | SVLT | | EAPR | | Q | | | | |
| | lambda | | | | | | | | | | |
| | variable | | | | | | | | | | |
| | 1-36 | | | | | | | | | | |
| 427 | immuno- | 1183 | SYEL- | 1606 | PSVS- | 2097 | CTGSVASYEL | 2516 | TQPPSVS | 3019 | VSPGQTASIT |
| | globulin | | TQPP | | VSPG | | | | | | |
| | lambda | | | | | | | | | | |
| | variable | | | | | | | | | | |
| | 1-36 | | | | | | | | | | |
| 428 | mannan- | 1184 | GSVA- | 1607 | GRLA- | 2098 | LLGLLCGSVA | 2517 | TPLGPKWPEPVF | 3020 | SPGFPGEYAN |
| | binding | | TPLG | | SPGF | | | | GRLA | | |
| | lectin | | | | | | | | | | |
| | serine | | | | | | | | | | |
| | protease 2 | | | | | | | | | | |
| 429 | immuno- | 1185 | DTTG- | 1608 | GTLS- | 2099 | LLLWLPDTTG | 2518 | EIVLTQSPGTLS | 3021 | LSPGERATLS |
| | globulin | | EIVL | | LSPG | | | | | | |
| | kappa | | | | | | | | | | |
| | variable | | | | | | | | | | |
| | 3-20 | | | | | | | | | | |
| 430 | immuno- | 1186 | TTGE- | 1609 | GTLS- | 2100 | LLWLPDTTGE | 2519 | IVLTQSPGTLS | 3022 | LSPGERATLS |
| | globulin | | IVLT | | LSPG | | | | | | |
| | kappa | | | | | | | | | | |
| | variable | | | | | | | | | | |
| | 3-20 | | | | | | | | | | |
| 431 | immuno- | 1187 | GSSG- | 1610 | LPVT- | 2101 | LMLWVPGSSG | 2520 | DVVMTQSPLSLP | 3023 | LGQPASISCR |
| | globulin | | DVVM | | LGQP | | | | VT | | |
| | kappa | | | | | | | | | | |
| | variable | | | | | | | | | | |
| | 2-30 | | | | | | | | | | |
| 432 | immuno- | 1188 | GSSG- | 1611 | SPLS- | 2102 | LMLWVPGSSG | 2521 | DVVMTQSPLS | 3024 | LPVTLGQPAS |
| | globulin | | DVVM | | LPVT | | | | | | |
| | kappa | | | | | | | | | | |
| | variable | | | | | | | | | | |
| | 2-30 | | | | | | | | | | |
| 433 | insulin- | 1189 | PVGK- | 1612 | QSTQ- | 2103 | DNFPRYPVGK | 2522 | FFQYDTWKQSTQ | 3025 | RLRRGLPALL |
| | like | | FFQY | | RLRR | | | | | | |
| | growth | | | | | | | | | | |
| | factor II | | | | | | | | | | |
| 434 | insulin- | 1190 | PVGK- | 1613 | TQRL- | 2104 | DNFPRYPVGK | 2523 | FFQYDTWKQSTQ | 3026 | RRGLPALLRA |
| | like | | FFQY | | RRGL | | | | RL | | |
| | growth | | | | | | | | | | |
| | factor II | | | | | | | | | | |
| 435 | apolipo- | 1191 | VNFL- | 1614 | TQPA- | 2105 | KAGTELVNFL | 2524 | SYFVELGTQPA | | N/A |
| | protein | | SYFV | | TQ | | | | | | |
| | A-II | | | | | | | | | | |
| 436 | apolipo- | 1192 | IKKA- | 1615 | TQPA- | 2106 | EQLTPLIKKA | 2525 | GTELVNFLSYFV | | N/A |
| | protein | | GTEL | | TQ | | | | ELGTQPA | | |
| | A-II | | | | | | | | | | |
| 437 | apolipo- | 1193 | FQTV- | 1616 | SPEL- | 2107 | SLVSQYFQTV | 2526 | TDYGKDLMEKVK | 3027 | QAEAKSYFEK |
| | protein | | TDYG | | QAEA | | | | SPEL | | |
| | A-II | | | | | | | | | | |
| 438 | probable | 1194 | GSSG- | 1617 | SPVT- | 2108 | LMLWVPGSSG | 2527 | DIVMTQTPLSSP | 3028 | LGQPASISFR |
| | non- | | DIVM | | LGQP | | | | VT | | |
| | functional | | | | | | | | | | |
| | immuno- | | | | | | | | | | |
| | globulin | | | | | | | | | | |
| | kappa | | | | | | | | | | |
| | variable | | | | | | | | | | |
| | 2D-24 | | | | | | | | | | |
| 439 | probable | 1195 | GSSG- | 1618 | TPLS- | 2109 | LMLWVPGSSG | 2528 | DIVMTQTPLS | 3029 | SPVTLGQPAS |
| | non- | | DIVM | | SPVT | | | | | | |
| | functional | | | | | | | | | | |
| | immuno- | | | | | | | | | | |
| | globulin | | | | | | | | | | |
| | kappa | | | | | | | | | | |
| | variable | | | | | | | | | | |
| | 2D-24 | | | | | | | | | | |
| 440 | pro- | 1196 | RTAT- | 1619 | FNPR- | 2110 | DRAIEGRTAT | 2529 | SEYQTFFNPR | 3030 | TFGSGEADCG |
| | thrombin | | SEYQ | | TFGS | | | | | | |
| 441 | pro- | 1197 | TATS- | 1620 | FNPR- | 2111 | RAIEGRTATS | 2530 | EYQTFFNPR | 3031 | TFGSGEADCG |
| | thrombin | | EYQT | | TFGS | | | | | | |
| 442 | pro- | 1198 | LVHS- | 1621 | LQRV- | 2112 | LAALCSLVHS | 2531 | QHVFLAPQQARS | 3032 | RRANTFLEEV |
| | thrombin | | QHVF | | RRAN | | | | LLQRV | | |
| 443 | coagu- | 1199 | SAEC- | 1622 | NRPK- | 2113 | LLGYLLSAEC | 2532 | TVFLDHENANKI | 3033 | RYNSGKLEEF |
| | lation | | TVFL | | RYNS | | | | LNRPK | | |
| | factor IX | | | | | | | | | | |
| 444 | coagu- | 1200 | ECTV- | 1623 | NRPK- | 2114 | GYLLSAECTV | 2533 | FLDHENANKILN | 3034 | RYNSGKLEEF |
| | lation | | FLDH | | RYNS | | | | RPK | | |
| | factor IX | | | | | | | | | | |
| 445 | apolipo- | 1201 | GVRA- | 1624 | KPLG- | 2115 | ALFLGVGVRA | 2534 | EEAGARVQQNVP | 3035 | DWAAGTMDPE |
| | protein L1 | | EEAG | | DWAA | | | | SGTDTGDPQSKP | | |
| | | | | | | | | | LG | | |
| 446 | apolipo- | 1202 | GVRA- | 1625 | QSKP- | 2116 | ALFLGVGVRA | 2535 | EEAGARVQQNVP | 3036 | LGDWAAGTMD |
| | protein L1 | | EEAG | | LGDW | | | | SGTDTGDPQSKP | | |
| 447 | deleted in | 1203 | RSKR- | | N/A | 2117 | YRGCVLRSKR | | N/A | 3037 | DVGSYQEKVD |
| | malignant | | DVGS | | (end | | | | | | VVLGPIQLQT |
| | brain | | | | of | | | | | | PPRREEEPR |
| | tumors 1 | | | | pro- | | | | | | |
| | protein | | | | tein) | | | | | | |
| 448 | desmo- | 1204 | GELR- | 1626 | KRRQ- | 2118 | VVILVHGELR | 2536 | IETKGQYDEEEM | 3038 | KREWVKFAKP |
| | glein-3 | | IETK | | KREW | | | | TMQQAKRRQ | | |
| 449 | desmo- | 1205 | LVHG- | 1627 | KRRQ- | 2119 | IFVVVILVHG | 2537 | ELRIETKGQYDE | 3039 | KREWVKFAKP |
| | glein-3 | | ELRI | | KREW | | | | EEMTMQQAKRRQ | | |
| 450 | calsyn- | 1206 | NHMA- | 1628 | PHPF- | 2120 | NPMEHANHMA | 2538 | AQPQFVHPEHRS | 3040 | AVVPSTATVV |
| | tenin-1 | | AQPQ | | AVVP | | | | FVDLSGHNLANP | | |
| | | | | | | | | | HPF | | |
| 451 | calsyn- | 1207 | HANH- | 1629 | PHPF- | 2121 | TANPMEHANH | 2539 | MAAQPQFVHPEH | 3041 | AVVPSTATVV |
| | tenin-1 | | MAAQ | | AVVP | | | | RSFVDLSGHNLA | | |
| | | | | | | | | | NPHPF | | |
| 452 | immuno- | 1208 | GAVT- | 1630 | AGVE- | 2122 | ISDFYPGAVT | 2540 | VAWKADSSPVKA | 3042 | TTTPSKQSNN |
| | globulin | | VAWK | | TTTP | | | | GVE | | |
| | lambda | | | | | | | | | | |
| | constant 3 | | | | | | | | | | |
| 453 | immuno- | 1209 | GAVT- | 1631 | SYLS- | 2123 | ISDFYPGAVT | 2541 | VAWKADSSPVKA | 3043 | LTPEQWKSHK |
| | globulin | | VAWK | | LTPE | | | | GVETTTPSKQSN | | |
| | lambda | | | | | | | | NKYAASSYLS | | |
| | constant 3 | | | | | | | | | | |
| 454 | immuno- | 1210 | SPVK- | 1632 | SYLS- | 2124 | AWKADSSPVK | 2542 | AGVETTTPSKQS | 3044 | LTPEQWKSHK |
| | globulin | | AGVE | | LTPE | | | | NNKYAASSYLS | | |
| | lambda | | | | | | | | | | |
| | constant 3 | | | | | | | | | | |
| 455 | complement | 1211 | KTWG- | 1633 | FRVG- | 2125 | FLIFLGKTWG | 2543 | QEQTYVISAPKI | 3045 | ASENIVIQVY |
| | C5 | | QEQT | | ASEN | | | | FRVG | | |
| 456 | alpha-2- | 1212 | NKVD- | 1634 | LRVT- | 2126 | VENCLANKVD | 2544 | LSFSPSQSLPAS | 3046 | AAPQSVCALR |
| | macro- | | LSFS | | AAPQ | | | | HAHLRVT | | |
| | globulin | | | | | | | | | | |
| 457 | alpha-2- | 1213 | PTDA- | 1635 | SLLH- | 2127 | LLLVLLPTDA | 2545 | SVSGKPQYMVLV | 3047 | TETTEKGCVL |
| | macro- | | SVSG | | TETT | | | | PSLLH | | |
| | globulin | | | | | | | | | | |
| 458 | myosin-9 | 1214 | M- | 1636 | DKNF- | | N/A | 2546 | AQQAADKYLYVD | 3048 | INNPLAQADW |
| | | | AQQA | | INNP | | | | KNF | | |
| 459 | sodium/ | 1215 | M- | 1637 | NGGL- | | N/A | 2547 | TGLSMDGGGSPK | 3049 | IFAGLAFIVG |
| | potassium- | | TGLS | | IFAG | | | | GDVDPFYYDYET | | |
| | transport- | | | | | | | | VRNGGL | | |
| | ing | | | | | | | | | | |
| | ATPase | | | | | | | | | | |
| | subunit | | | | | | | | | | |
| | gamma | | | | | | | | | | |
| 460 | sodium/ | 1216 | M- | 1638 | DVDP- | | N/A | 2548 | TGLSMDGGGSPK | 3050 | FYYDYETVRN |
| | potassium- | | TGLS | | FYYD | | | | GDVDP | | |
| | transport- | | | | | | | | | | |
| | ing | | | | | | | | | | |
| | ATPase | | | | | | | | | | |
| | subunit | | | | | | | | | | |
| | gamma | | | | | | | | | | |
| 461 | immuno- | 1217 | GSSG- | 1639 | SPLS- | 2128 | LMLWVSGSSG | 2549 | DIVMTQSPLS | 3051 | LPVTPGEPAS |
| | globulin | | DIVM | | LPVT | | | | | | |
| | kappa | | | | | | | | | | |
| | variable | | | | | | | | | | |
| | 2-28 | | | | | | | | | | |
| 462 | immuno- | 1218 | GSSG- | 1640 | LPVT- | 2129 | LMLWVSGSSG | 2550 | DIVMTQSPLSLP | 3052 | PGEPASISCR |
| | globulin | | DIVM | | PGEP | | | | VT | | |
| | kappa | | | | | | | | | | |
| | variable | | | | | | | | | | |
| | 2-28 | | | | | | | | | | |
| 463 | onco- | 1219 | RMRR- | | N/A | 2130 | AQGCHRRMRR | | N/A | 3053 | GAGGEDSAGL |
| | protein- | | GAGG | | (end | | | | | | QGQTLTGGPI |
| | induced | | | | of | | | | | | RIDWED |
| | transcript | | | | pro- | | | | | | |
| | 3 protein | | | | tein) | | | | | | |
| 464 | serglycin | 1220 | SDAF- | | N/A | 2131 | YQLVDESDAF | | N/A | 3054 | HDNLRSLDRN |
| | | | HDNL | | (end | | | | | | LPSDSQDLGQ |
| | | | | | of | | | | | | HGLEEDFML |
| | | | | | pro- | | | | | | |
| | | | | | tein) | | | | | | |
| 465 | coagula- | 1221 | GDRN- | | N/A | 2132 | SWGSGCGDRN | | N/A | 3055 | KPGVYTDVAY |
| | tion | | KPGV | | (end | | | | | | YLAWIREHTV |
| | factor XII | | | | of | | | | | | S |
| | | | | | pro- | | | | | | |
| | | | | | tein) | | | | | | |
| 466 | coagula- | 1222 | M- | 1641 | VVPR- | | N/A | 2551 | SETSRTAFGGRR | 3056 | GVNLQEFLNV |
| | tion | | SETS | | GVNL | | | | AVPPNNSNAAED | | |
| | factor | | | | | | | | DLPTVELQGVVP | | |
| | XIII | | | | | | | | R | | |
| | A chain | | | | | | | | | | |
| 467 | insulin | 1223 | KTRR- | 1642 | GSLQ- | 2133 | GFFYTPKTRR | 2552 | EAEDLQVGQVEL | 3057 | KRGIVEQCCT |
| | | | EAED | | KRGI | | | | GGGPGAGSLQPL | | |
| | | | | | | | | | ALEGSLQ Q | | |
| 468 | histidine- | 1224 | GKFK- | | N/A | 2134 | VSESCPGKFK | | N/A | 3058 | SGFPQVSMFF |
| | rich | | SGFP | | (end | | | | | | THTFPK |
| | glyco- | | | | of | | | | | | |
| | protein | | | | pro- | | | | | | |
| | | | | | tein) | | | | | | |
| 469 | immuno- | 1225 | DTTG- | 1643 | ATLS- | 2135 | LLLWLPDTTG | 2553 | EIVLTQSPATLS | 3059 | LSPGERATLS |
| | globulin | | EIVL | | LSPG | | | | | | |
| | kappa | | | | | | | | | | |
| | variable | | | | | | | | | | |
| | 3-11 | | | | | | | | | | |
| 470 | immuno- | 1226 | GARC- | 1644 | SSLS- | 2136 | LLLWLRGARC | 2554 | DIQMTQSPSSLS | 3060 | ASVGDRVTIT |
| | globulin | | DIQM | | ASVG | | | | | | |
| | kappa | | | | | | | | | | |
| | variable | | | | | | | | | | |
| | 1-3 | | | | | | | | | | |
| 471 | collagen | 1227 | AGFD- | 1645 | QPPQ- | 2137 | PPGPPSAGFD | 2555 | FSFLPQPPQ | 3061 | EKAHDGGRYY |
| | alpha-1(1) | | FSFL | | EKAH | | | | | | |
| | chain | | | | | | | | | | |
| 472 | inter- | 1228 | CVGS- | 1646 | RVPR- | 2138 | CLGLSLCVGS | 2556 | QEEAQSWGHSSE | 3062 | QVRLLQRLKT |
| | alpha- | | QEEA | | QVRL | | | | QDGLRVPR | | |
| | trypsin | | | | | | | | | | |
| | inhibitor | | | | | | | | | | |
| | heavy | | | | | | | | | | |
| | chain H5 | | | | | | | | | | |
| 473 | latent- | 1229 | AGHA- | 1647 | AAKV- | 2139 | LALFVGAGHA | 2557 | QRDPVGRYEPAG | 3063 | YSLFREQDAP |
| | trans- | | QRDP | | YSLF | | | | GDANRLRRPGGS | | |
| | forming | | | | | | | | YPAAAAAKV | | |
| | growth | | | | | | | | | | |
| | factor | | | | | | | | | | |
| | beta- | | | | | | | | | | |
| | binding | | | | | | | | | | |
| | protein 2 | | | | | | | | | | |
| 474 | latent- | 1230 | AGHA- | 1648 | RPGG- | 2140 | LALFVGAGHA | 2558 | QRDPVGRYEPAG | 3064 | SYPAAAAAKV |
| | trans- | | QRDP | | SYPA | | | | GDANRLRRPGG | | |
| | forming | | | | | | | | | | |
| | growth | | | | | | | | | | |
| | factor | | | | | | | | | | |
| | beta- | | | | | | | | | | |
| | binding | | | | | | | | | | |
| | protein 2 | | | | | | | | | | |
| 475 | integrin | 1231 | RDRR- | 1649 | QPSR- | 2141 | HPAHHKRDRR | 2559 | QIFLPEPEQPSR | 3065 | LQDPVLVSCD |
| | alpha-IIb | | QIFL | | LQDP | | | | | | |
| 476 | membrane- | 1232 | LLYK- | 1650 | LPRL- | 2142 | LGLCIFLLYK | 2560 | IVRGDQPAASGD | 3066 | KRRDFTPAEL |
| | associated | | IVRG | | KRRD | | | | SDDDEPPPLPRL | | |
| | progester- | | | | | | | | | | |
| | one | | | | | | | | | | |
| | receptor | | | | | | | | | | |
| | component | | | | | | | | | | |
| | 1 | | | | | | | | | | |
| 477 | immuno- | 1233 | GSWA- | 1651 | HSVS- | 2143 | LLAHCTGSWA | 2561 | NFMLTQPHSVS | 3067 | ESPGKTVTIS |
| | globulin | | NFML | | ESPG | | | | | | |
| | lambda | | | | | | | | | | |
| | variable | | | | | | | | | | |
| | 6-57 | | | | | | | | | | |
| 478 | immuno- | 1234 | SWAN- | 1652 | HSVS- | 2144 | LAHCTGSWAN | 2562 | FMLTQPHSVS | 3068 | ESPGKTVTIS |
| | globulin | | FMLT | | ESPG | | | | | | |
| | lambda | | | | | | | | | | |
| | variable | | | | | | | | | | |
| | 6-57 | | | | | | | | | | |
| 479 | immuno- | 1235 | DTTG- | 1653 | ATLS- | 2145 | LLLWLPDTTG | 2563 | EIVMTQSPATLS | 3069 | VSPGERATLS |
| | globulin | | EIVM | | VSPG | | | | | | |
| | kappa | | | | | | | | | | |
| | variable | | | | | | | | | | |
| | 3-15 | | | | | | | | | | |
| 480 | complement | 1236 | PTRG- | 1654 | QQLT- | 2146 | GVLQACPTRG | 2564 | SVLLAQELPQQL | 3070 | SPGYPEPYGK |
| | C1r | | SVLL | | SPGY | | | | T | | |
| | sub- | | | | | | | | | | |
| | component- | | | | | | | | | | |
| | like | | | | | | | | | | |
| | protein | | | | | | | | | | |
| 481 | histone | 1237 | M- | 1655 | KKAA- | | N/A | 2565 | SETAPAAPAAAP | 3071 | KKAGGTPRKA |
| | H1.2 | | SETA | | KKAG | | | | PAEKAPVKKKAA | | |
| 482 | rho GDP- | 1238 | M- | 1656 | KLNY- | | N/A | 2566 | TEKAPEPHVEED | 3072 | KPPPQKSLKE |
| | dissoci- | | TEKA | | KPPP | | | | DDDELDSKLNY | | |
| | ation | | | | | | | | | | |
| | inhibitor | | | | | | | | | | |
| | 2 | | | | | | | | | | |
| 483 | latent- | 1239 | FARR- | 1657 | SRDT- | 2147 | PPPPGPFARR | 2567 | EAPYGAPRFDMP | 3073 | RRSFPEPEEP |
| | trans- | | EAPY | | RRSF | | | | DFEDDGGPYGES | | |
| | forming | | | | | | | | EAPAPPGPGTRW | | |
| | growth | | | | | | | | PYRSRDT | | |
| | factor | | | | | | | | | | |
| | beta- | | | | | | | | | | |
| | binding | | | | | | | | | | |
| | protein 4 | | | | | | | | | | |
| 484 | collagen | 1240 | PWRA- | 1658 | HHSS- | 2148 | PHPTARPWRA | 2568 | DDILASPPRLPE | 3074 | YVHLRPARPT |
| | alpha- | | DDIL | | YVHL | | | | PQPYPGAPHHSS | | |
| | 1(XVIII) | | | | | | | | | | |
| | chain | | | | | | | | | | |
| 485 | immuno- | 1241 | GSWA- | 1659 | PSVS- | 2149 | LLTQGTGSWA | 2569 | QSALTQPPSVS | 3075 | GSPGQSVTIS |
| | globulin | | QSAL | | GSPG | | | | | | |
| | lambda | | | | | | | | | | |
| | variable | | | | | | | | | | |
| | 2-18 | | | | | | | | | | |
| 486 | immuno- | 1242 | QSAL- | 1660 | PSVS- | 2150 | GTGSWAQSAL | 2570 | TQPPSVS | 3076 | GSPGQSVTIS |
| | globulin | | TQPP | | GSPG | | | | | | |
| | lambda | | | | | | | | | | |
| | variable | | | | | | | | | | |
| | 2-18 | | | | | | | | | | |
| 487 | zinc- | 1243 | SSLA- | | N/A | 2151 | SCHVQHSSLA | | N/A | 3077 | QPLVVPWEAS |
| | alpha-2- | | QPLV | | (end | | | | | | |
| | glycopro- | | | | of | | | | | | |
| | tein | | | | pro- | | | | | | |
| | | | | | tein) | | | | | | |
| 488 | talin-1 | 1244 | TVLQ- | 1661 | FQVG- | 2152 | VSPKKSTVLQ | 2571 | QQYNRVGKVEHG | 3078 | SMPPAQQQIT |
| | | | QQYN | | SMPP | | | | SVALPAIMRSGA | | |
| | | | | | | | | | SGPENFQVG | | |
| 489 | secreto- | 1245 | LRDP- | 1662 | HSRE- | 2153 | KFEVRLLRDP | 2572 | ADASEAHESSSR | 3079 | RADEPQWSLY |
| | granin-1 | | ADAS | | RADE | | | | GEAGAPGEEDIQ | | |
| | | | | | | | | | GPTKADTEKWAE | | |
| | | | | | | | | | GGGHSRE | | |
| 490 | neutrophil | 1246 | QAQA- | 1663 | PEQI- | 2154 | ILLVALQAQA | 2573 | EPLQARADEVAA | 3080 | AADIPEVVVS |
| | defensin 3 | | EPLQ | | AADI | | | | APEQI | | |
| 491 | cytochrome | 1247 | LYDN- | 1664 | PEKF- | 2155 | PTLDSVLYDN | 2574 | QEFPDPEKF | 3081 | KPEHFLNENG |
| | P450 2E1 | | QEFP | | KPEH | | | | | | |
| 492 | gastric | 1248 | VGLG- | 1665 | RGPR- | 2156 | LSLFLAVGLG | 2575 | EKKEGHFSALPS | 3082 | YAEGTFISDY |
| | inhibitory | | EKKE | | YAEG | | | | LPVGSHAKVSSP | | |
| | polypep- | | | | | | | | QPRGPR | | |
| | tide | | | | | | | | | | |
| 493 | immuno- | 1249 | GVQC- | 1666 | GSLR- | 2157 | LAAILKGVQC | 2576 | EVQLVESGGGLV | 3083 | LSCAASGFTF |
| | globulin | | EVQL | | LSCA | | | | KPGGSLR | | |
| | heavy | | | | | | | | | | |
| | variable | | | | | | | | | | |
| | 3-15 | | | | | | | | | | |
| 494 | immuno- | 1250 | SWAQ- | 1667 | RSVS- | 2158 | LTQGTGSWAQ | 2577 | SALTQPRSVS | 3084 | GSPGQSVTIS |
| | globulin | | SALT | | GSPG | | | | | | |
| | lambda | | | | | | | | | | |
| | variable | | | | | | | | | | |
| | 2-11 | | | | | | | | | | |
| 495 | trans- | 1251 | DIDC- | 1668 | PPPP- | 2159 | YDADCEDIDC | 2578 | KLMPPPPPP | 3085 | PGPMKKDKDQ |
| | cription | | KLMP | | PGPM | | | | | | |
| | initiation | | | | | | | | | | |
| | factor | | | | | | | | | | |
| | TFIID | | | | | | | | | | |
| | subunit 1 | | | | | | | | | | |
| 496 | collagen | 1252 | EQGR- | 1669 | PPGP- | 2160 | EKGERGEQGR | 2579 | DGPPGLPGTPGP | 3086 | KVSVDEPGPG |
| | alpha- | | DGPP | | KVSV | | | | PGPPGP | | |
| | 1(VII) | | | | | | | | | | |
| | chain | | | | | | | | | | |
| 497 | kinino- | 1253 | SLMK- | 1670 | FSPF- | 2161 | QPLGMISLMK | 2580 | RPPGFSPF | 3087 | RSSRIGEIKE |
| | gen-1 | | RPPG | | RSSR | | | | | | |
| 498 | integral | 1254 | AIRH- | 1671 | AVET- | 2162 | EASNCFAIRH | 2581 | FENKFAVET | 3088 | LICS |
| | membrane | | FENK | | LICS | | | | | | |
| | protein | | | | | | | | | | |
| | 2B | | | | | | | | | | |
| 499 | pigment | 1255 | QPAH- | | N/A | 2163 | TPSPGLQPAH | | N/A | 3089 | LTFPLDYHLN |
| | epithel- | | LTFP | | (end | | | | | | QPFIFVLRDT |
| | ium- | | | | of | | | | | | DTGALLFIGK |
| | derived | | | | pro- | | | | | | ILDPRGP |
| | factor | | | | tein) | | | | | | |
| 500 | voltage- | 1256 | RHRA- | 1672 | ADKE- | 2164 | GEEPARRHRA | 2582 | RHKAQPAHEAVE | 3090 | KELRNHQPRE |
| | dependent | | RHKA | | KELR | | | | KETTEKEATEKE | | |
| | N-type | | | | | | | | AEIVEADKE | | |
| | calcium | | | | | | | | | | |
| | channel | | | | | | | | | | |
| | subunit | | | | | | | | | | |
| | alpha-1B | | | | | | | | | | |
| 501 | immuno- | 1257 | SVAS- | 1673 | SSVS- | 2165 | LILCTVSVAS | 2583 | YELTQPSSVS | 3091 | VSPGQTARIT |
| | globulin | | YELT | | VSPG | | | | | | |
| | lambda | | | | | | | | | | |
| | variable | | | | | | | | | | |
| | 3-27 | | | | | | | | | | |
| 502 | ras | 1258 | PGGL- | 1674 | LSFQ- | 2166 | HPALNQPGGL | 2584 | QPLSFQ | 3092 | NPVYHLNNPI |
| | GTPase- | | QPLS | | NPVY | | | | | | |
| | activating | | | | | | | | | | |
| | protein | | | | | | | | | | |
| | nGAP | | | | | | | | | | |
| 503 | keratin, | 1259 | RQVR- | 1675 | HQTT- | 2167 | KEPVTTRQVR | 2585 | TIVEEVQDGKVI | | N/A |
| | type I | | TIVE | | R | | | | SSREQVHQTT | | |
| | cytoskel- | | | | | | | | | | |
| | etal 17 | | | | | | | | | | |
| 504 | tubulin | 1260 | MNTF- | 1676 | EPYN- | 2168 | EYPDRIMNTF | 2586 | SVVPSPKVSDTV | 3093 | ATLSVHQLVE |
| | beta chain | | SVVP | | ATLS | | | | VEPYN | | |
| 505 | sulfhydryl | 1261 | PGLR- | 1677 | WHLS- | 2169 | RPPKLHPGLR | 2587 | AAPGQEPPEHMA | 3094 | KRDTGAALLA |
| | oxidase 1 | | AAPG | | KRDT | | | | ELQRNEQEQPLG | | |
| | | | | | | | | | QWHLS | | |
| 506 | immuno- | 1262 | GAYG- | 1678 | SLAV- | 2170 | LLLWISGAYG | 2588 | DIVMTQSPDSLA | 3095 | SLGERATINC |
| | globulin | | DIVM | | SLGE | | | | V | | |
| | kappa | | | | | | | | | | |
| | variable | | | | | | | | | | |
| | 4-1 | | | | | | | | | | |
| 507 | complement | 1263 | RAGG- | 1679 | GEVT- | 2171 | VPALFCRAGG | 2589 | SIPIPQKLFGEV | 3096 | SPLFPKPYPN |
| | C1r sub- | | SIPI | | SPLF | | | | T | | |
| | component | | | | | | | | | | |
| 508 | homeobox | 1264 | KKPS- | 1680 | SPSP- | 2172 | KEKKSAKKPS | 2590 | QSATSPSP | 3097 | AASAVPASGV |
| | protein | | QSAT | | AASA | | | | | | |
| | Hox-B2 | | | | | | | | | | |
| 509 | trans- | 1265 | VALP- | 1681 | SPPG- | 2173 | ISKPPGVALP | 2591 | TVSPPG | 3098 | VDAKAQVKTE |
| | cription | | TVSP | | VDAK | | | | | | |
| | factor | | | | | | | | | | |
| | SOX-10 | | | | | | | | | | |
| 510 | E3 | 1266 | NKPC- | 1682 | TPSP- | 2174 | STGPSANKPC | 2592 | SKQPPPQPQHTP | 3099 | AAPPAAATIS |
| | ubiquitin- | | SKQP | | AAPP | | | | SP | | |
| | protein | | | | | | | | | | |
| | ligase | | | | | | | | | | |
| | SIAH2 | | | | | | | | | | |
| 511 | decorin | 1267 | GLDK- | | N/A | 2175 | VQCSDLGLDK | | N/A | 3100 | VPKDLPPDTT |
| | | | VPKD | | | | | | | | |
| 512 | SPARC | 1268 | HPVE- | | N/A | 2176 | RLEAGDHPVE | | N/A | 3101 | LLARDFEKNY |
| | | | LLAR | | | | | | | | |
| 513 | elastin | 1269 | LGYP- | | N/A | 2177 | PQPGVPLGYP | | N/A | 3102 | IKAPKLPGGY |
| | | | IKAP | | | | | | | | |
| 514 | elastin | 1270 | PGVV- | | N/A | 2178 | GGPGFGPGVV | | N/A | 3103 | GVPGAGVPGV |
| | | | GVPG | | | | | | | | |
| 515 | type I | 1271 | GVRG- | | N/A | 2179 | GSPGKDGVRG | | N/A | 3104 | LTGPIGPPGP |
| | collagen | | LTGP | | | | | | | | |
| | alpha-1 | | | | | | | | | | |
| | chain | | | | | | | | | | |
| 516 | type IV | 1272 | SDGL- | | N/A | 2180 | EPGPAGSDGL | | N/A | 3105 | PGLKGKRGDS |
| | collagen | | PGLK | | | | | | | | |
| | alpha-1 | | | | | | | | | | |
| | chain | | | | | | | | | | |
| 517 | laminin | 1273 | QAKN- | | N/A | 2181 | LNRKYEQAKN | | N/A | 3106 | ISQDLEKQAA |
| | gamma 1 | | ISQD | | | | | | | | |
| | chain | | | | | | | | | | |
| 518 | vimentin | 1274 | PGVR- | | N/A | 2182 | RLRSSVPGVR | | N/A | 3107 | LLQDSVDFSL |
| | | | LLQD | | | | | | | | |
| 519 | type III | 1275 | QGLQ- | | N/A | 2183 | TGPPGPQGLQ | | N/A | 3108 | GLPGTGGPPG |
| | collagen | | GLPG | | | | | | | | |
| 520 | type IV | 1276 | DPGE- | | N/A | 2184 | LPGMKGDPGE | | N/A | 3109 | ILGHVPGMLL |
| | collagen | | ILGH | | | | | | | | |
| | alpha-1 | | | | | | | | | | |
| | chain | | | | | | | | | | |
| 521 | type IV | 1277 | PPGP- | | N/A | 2185 | LPGSPGPPGP | | N/A | 3110 | PGDIVFRKGP |
| | collagen | | PGDI | | | | | | | | |
| | alpha-3 | | | | | | | | | | |
| | chain | | | | | | | | | | |
| 522 | type VII | 1278 | GRLV- | | N/A | 2186 | GPPGPPGRLV | | N/A | 3111 | DTGPGAREKG |
| | collagen | | DTGP | | | | | | | | E |
| | alpha-1 | | | | | | | | | | |
| | chain | | | | | | | | | | |
| 523 | fibrinogen | 1279 | ADSG- | 1683 | GGVR- | 2187 | VGTAWTADSG | 2593 | EGDFLAEGGGVR | 3112 | GPRVVERHQS |
| | alpha | | EGDF | | GPRV | | | | | | |
| | chain | | | | | | | | | | |
| 524 | fibrinogen | 1280 | AWTA- | 1684 | GGVR- | 2188 | LSVVGTAWTA | 2594 | DSGEGDFLAEGG | 3113 | GPRVVERHQS |
| | alpha | | DSGE | | GPRV | | | | GVR | | |
| | chain | | | | | | | | | | |
| 525 | elastin | 1281 | SPEA- | | N/A | 2189 | VPGVGISPEA | | N/A | 3114 | QAAAAAKAAK |
| | | | QAAA | | | | | | | | |
| 526 | C-reactive | 1282 | DMSR- | | N/A | 2190 | HAFGQTDMSR | | N/A | 3115 | KAFVFP |
| | protein | | KAFV | | | | | | | | |
| 527 | elastin | 1283 | GPGG- | | N/A | 2191 | GVAPGIGPGG | | N/A | 3116 | VAAAAKSAAK |
| | | | VAAA | | | | | | | | |
| 528 | type VI | 1284 | GAKG- | | N/A | 2192 | APRGVKGAKG | | N/A | 3117 | YRGPEGPQGP |
| | collagen | | YRGP | | | | | | | | |
| | alpha-1 | | | | | | | | | | |
| | chain | | | | | | | | | | |
| 529 | type V | 1285 | GPSG- | | N/A | 2193 | GPPGKRGPSG | | N/A | 3118 | HMGREGREGE |
| | collagen | | HMGR | | | | | | | | |
| | alpha-1 | | | | | | | | | | |
| | chain | | | | | | | | | | |
| 530 | complement | 1286 | STGR- | 1685 | RQIR- | 2194 | LNVTLSSTGR | 2595 | NGFKSHALQLNN | 3119 | GLEEELQFSL |
| | C4-A OR | | NGFK | | GLEE | | | | RQIR | | |
| | complement | | | | | | | | | | |
| | C4-B | | | | | | | | | | |
| 531 | complement | 1287 | LPSR- | 1686 | SLLR- | 2195 | LDVSLQLPSR | 2596 | SSKITHRIHWES | 3120 | SEETKENEGF |
| | C3 | | SSKI | | SEET | | | | ASLLR | | |
| 532 | fibrinogen | 1288 | FESK- | 1687 | RPVR- | 2196 | NRGDSTFESK | 2597 | SYKMADEAGSEA | 3121 | DCDDVLQTHP |
| | alpha | | SYKM | | DCDD | | | | DHEGTHSTKRGH | | |
| | chain | | | | | | | | AKSRPVR | | |
| 533 | nidogen-1 | 1289 | HERE- | | N/A | 2197 | VEKTRCQHER | | N/A | 3122 | HILGAAGATD |
| | | | HILG | | | | E | | | | |
| 534 | type VI | 1290 | GNRG- | | N/A | 2198 | GPKGGIGNRG | | N/A | 3123 | PRGETGDDGR |
| | collagen | | PRGE | | | | | | | | |
| | alpha-3 | | | | | | | | | | |
| | chain | | | | | | | | | | |

*The (putative) scissile bond of each cleavage sequence listed in Table A, cleavage sequence 1 and cleavage sequence 2 (if present) in each reporter polypeptide, is indicated by a hyphen (-).
“N/A” indicates that the amino acid sequence of the corresponding cleavage sequence is not, or cannot be, specified in the instance.

[0393] In some embodiments of the compositions (such as the therapeutic agents, or activatable therapeutic agents described hereinabove) or methods described herein, the mammalian protease (for cleavage of the release segment (RS), or the first release segment (RS1), or the second release segment (RS2)) can be a serine protease, a cysteine protease, an aspartate protease, a threonine protease, or a metalloproteinase. The mammalian protease (for cleavage of the release segment (RS), or the first release segment (RS1), or the second release segment (RS2)) can be selected from the group consisting of disintegrin and metalloproteinase domain-containing protein 10 (ADAM10), disintegrin and metalloproteinase domain-containing protein 12 (ADAM12), disintegrin and metalloproteinase domain-containing protein 15 (ADAM15), disintegrin and metalloproteinase domain-containing protein 17 (ADAM17), disintegrin and metalloproteinase domain-containing protein 9 (ADAM9), disintegrin and metalloproteinase with thrombospondin motifs 5 (ADAMTS5), Cathepsin B, Cathepsin D, Cathepsin E, Cathepsin K, cathepsin L, cathepsin S, Fibroblast activation protein alpha, Hepsin, kallikrein-2, kallikrein-4, kallikrein-3, Prostate-specific antigen (PSA), kallikrein-13, Legumain, matrix metallopeptidase 1 (MMP-1), matrix metallopeptidase 10 (MMP-10), matrix metallopeptidase 11 (MMP-11), matrix metallopeptidase 12 (MMP-12), matrix metallopeptidase 13 (MMP-13), matrix metallopeptidase 14 (MMP-14), matrix metallopeptidase 16 (MMP-16), matrix metallopeptidase 2 (MMP-2), matrix metallopeptidase 3 (MMP-3), matrix metallopeptidase 7 (MMP-7), matrix metallopeptidase 8 (MMP-8), matrix metallopeptidase 9 (MMP-9), matrix metallopeptidase 4 (MMP-4), matrix metallopeptidase 5 (MMP-5), matrix metallopeptidase 6 (MMP-6), matrix metallopeptidase 15 (MMP-15), neutrophil elastase, protease activated receptor 2 (PAR2), plasmin, prostasin, PSMA-FOLH1, membrane type serine protease 1 (MT-SP1), matriptase, and u-plasminogen. The mammalian protease (for cleavage of the release segment (RS), or the first release segment (RS1), or the second release segment (RS2)) can be selected from the group consisting of matrix metallopeptidase 1 (MMP1), matrix metallopeptidase 2 (MMP2), matrix metallopeptidase 7 (MMP1), matrix metallopeptidase 9 (MMP9), matrix metallopeptidase 11 (MMP11), matrix metallopeptidase 14 (MMP14), urokinase-type plasminogen activator (uPA), legumain, and matriptase. The mammalian protease can be preferentially expressed or activated in the target tissue or cell.

[0394] In some embodiments of the compositions (such as the therapeutic agents, or activatable therapeutic agents described hereinabove) or methods described herein, the target tissue or cell can be characterized by an increased amount or activity of a mammalian protease (such as one described herein) in proximity to the target tissue or cell as compared to a non-target tissue or cell in a subject. The target tissue or cell can be characterized by a presence, in proximity thereto, of at least (about) 10% more, at least (about) 20% more, at least (about) 30% more, at least (about) 40% more, at least (about) 50% more, at least (about) 60% more, at least (about) 70% more, at least (about) 80% more, at least (about) 90% more, at least (about) 100% more, or at least (about) 200% more amount of the mammalian protease as compared to a non-target tissue or cell in the subject. The target tissue or cell can be characterized by an activity, in proximity thereto, of the mammalian protease of at least (about) 10% higher, at least (about) 20% higher, at least (about) 30% higher, at least (about) 40% higher, at least (about) 50% higher, at least (about) 60% higher, at least (about) 70% higher, at least (about) 80% higher, at least (about) 90% higher, at least (about) 100% higher, or at least (about) 200% higher as compared to a non-target tissue or cell in the subject. The target tissue or cell can produce or can be co-localized with the mammalian protease (such as one described herein). The target tissue or cell can be a tumor.

[0395] In some embodiments, the compositions of this disclosure (such as activatable therapeutic agents) are designed with considerations of the location of the target tissue protease as well as the presence of the same protease in healthy tissues not intended to be targeted, but a greater presence of the ligand in unhealthy target tissue, in order to provide a wide therapeutic window. A “therapeutic window” refers to the largest difference between the minimal effective dose and the maximal tolerated dose for a given therapeutic composition. To help achieve a wide therapeutic window, the binding domains of the compositions are shielded by the proximity of the masking moiety (e.g., XTEN) such that the binding affinity of the intact composition for one or both of the ligands is reduced compared to the composition that has been cleaved by a mammalian protease, thereby releasing the biologically active moiety from the shielding effects of the masking moiety.

### Nucleic Acids, Expression Vectors, Host Cells

[0396] Provided herein, in some embodiments, is an isolated nucleic acid comprising: (a) a polynucleotide encoding a recombinant polypeptide as described herein; or (b) a reverse complement of the polynucleotide of (a).

[0397] Provided herein, in some embodiments, is an expression vector comprising a polynucleotide sequence as described herein and a recombinant regulatory sequence operably linked to the polynucleotide sequence.

[0398] Provided herein, in some embodiments, is an isolated host cell, comprising an expression vector as described herein. The isolated host cell can be a prokaryote. The isolated host cell can be E. coli. The isolated host cell can be mammalian cell(s).

### Pharmaceutical Compositions

[0399] Provided herein, in some embodiments, is a pharmaceutical composition comprising a therapeutic agent (such as described hereinabove or described anywhere else herein) and one or more pharmaceutically suitable excipients. The pharmaceutical composition can be formulated for oral, intradermal, subcutaneous, intravenous, intra-arterial, intraabdominal, intraperitoneal, intrathecal, or intramuscular administration. The pharmaceutical composition can be in a liquid form or frozen form. The pharmaceutical composition can be in a pre-filled syringe for a single injection. The pharmaceutical composition can be formulated as a lyophilized powder to be reconstituted prior to administration.

### Kits

[0400] Provided herein, in some embodiments, is a kit comprising a pharmaceutical composition described herein (or a therapeutic agent described herein), a container, and a label or package insert on or associated with the container.

### Methods

### Methods for Assessing a Likelihood of a Response to Therapeutic Agent(s)

[0401] Provided herein, in some embodiments, is a method for assessing a likelihood of a subject being responsive to a therapeutic agent that is activatable by a mammalian protease expressed in the subject, the method comprising:
[0402] (a) determining, in a biological sample from the subject, a presence or an amount of
   [0403] (i) a polypeptide comprising at least four, at least five, at least six, at least seven, at least eight, at least nine, or at least ten consecutive amino acid residues shown in a sequence set forth in Column V of Table A (or a subset thereof); or
   [0404] (ii) a polypeptide comprising at least four, at least five, at least six, at least seven, at least eight, at least nine, or at least ten consecutive amino acids shown in a sequence set forth in Column IV of Table A (or a subset thereof); or
   [0405] (iii) a polypeptide comprising at least four, at least five, at least six, at least seven, at least eight, at least nine, or at least ten consecutive amino acids shown in a sequence set forth in Column VI of Table A (or a subset thereof); and
[0406] (b) designating the subject as being likely to respond to the therapeutic agent when the polypeptide of (i), (ii) or (iii) is present and/or if its amount exceeds a threshold.

[0407] In some embodiments of the method for assessing the likelihood of the subject being responsive to the therapeutic agent, the therapeutic agent can comprise a peptide substrate susceptible to cleavage by the mammalian protease (e.g., at a scissile bond). The peptide substrate can be susceptible to cleavage by the mammalian protease at a scissile bond. The polypeptide of (i), (ii), or (iii) can comprise a portion (e.g., containing at least four, at least five, at least six, at least seven, at least eight, at least nine, at least ten, at least eleven, at least twelve, at least thirteen, at least fourteen, or at least fifteen consecutive amino acid residues) of the peptide substrate that is either N-terminal or C-terminal side of the scissile bond. The portion (e.g., containing at least four, at least five, at least six, at least seven, at least eight, at least nine, at least ten, at least eleven, at least twelve, at least thirteen, at least fourteen, or at least fifteen consecutive amino acid residues) of the peptide substrate can be either immediately N-terminal or immediately C-terminal of the scissile bond. The polypeptide of (i) can comprise at least four, at least five, at least six, at least seven, at least eight, at least nine, or at least ten consecutive amino acid residues shown in a sequence set forth in Column V of Table A (or a subset thereof). The polypeptide of (i) can comprise a sequence set forth in Column V of Table A (or a subset thereof). The polypeptide of (ii) can comprise at least four, at least five, at least six, at least seven, at least eight, at least nine, or at least ten consecutive amino acids shown in a sequence set forth in Column IV of Table A (or a subset thereof). The polypeptide of (ii) can comprise a sequence set forth in Column IV of Table A (or a subset thereof). The polypeptide of (iii) can comprise at least four, at least five, at least six, at least seven, at least eight, at least nine, or at least ten consecutive amino acids shown in a sequence set forth in Column VI of Table A (or a subset thereof). The polypeptide of (iii) can comprise a sequence set forth in Column VI of Table A (or a subset thereof). In some embodiments of the method for assessing the likelihood, (a) comprises determining the presence or the amount of any two of (i)-(iii). In some embodiments of the method for assessing the likelihood, (a) comprises determining the presence or the amount of all three of (i)-(iii). Additionally or alternatively, the subject designated, by the method described herein in the section entitled “METHODS FOR ASSESSING A LIKELIHOOD OF A RESPONSE TO THERAPEUTIC AGENT(S),” as being likely to respond to the activatable therapeutic agent (such as one described herein) can be one with an expression profile of biomarker(s) such that, upon administering an activatable therapeutic agent (such as one described herein) to the subject, the activatable therapeutic agent is more likely than not to be cleaved at or near the target tissue(s) or cell(s) (such as described herein in the “Target Tissues or Cells” section), e.g., by mammalian protease(s), thereby activating the therapeutic agent. In some embodiments of the method for assessing the likelihood, the threshold can be zero or nominal. The peptide substrate can be any peptide substrate described hereinabove in the RELEASE SEGMENTS section or described anywhere else herein. The activatable therapeutic agent can be any therapeutic agent (or any activatable therapeutic agent, or any non-natural, activatable therapeutic agent) as described hereinabove in the THERAPEUTIC AGENTS section or described anywhere else herein. The mammalian protease can be any mammalian protease as described hereinabove in the TARGET TISSUES OR CELLS section or described anywhere else herein. The target tissue or cell can be any one described hereinabove in the TARGET TISSUES OR CELLS section or described anywhere else herein. The target tissue or cell can be a tumor.

[0408] In some embodiments of the method for assessing the likelihood, the biological sample can be selected from serum, plasma, blood, spinal fluid, semen, and saliva. The biological sample can comprise a serum or plasma sample. The biological sample can comprise a serum sample. The biological sample can comprise a plasma sample. The biological sample can comprise a blood sample. The biological sample can comprise a spinal fluid sample. The biological sample can comprise a semen sample. The biological sample can comprise a saliva sample.

[0409] In some embodiments of the method for assessing the likelihood, the subject can be suffering from, or can be suspected of suffering from, a disease or condition characterized by an increased expression or activity of the mammalian protease in proximity to a target tissue or cell (such as one described hereinabove in the TARGET TISSUES OR CELLS section or described anywhere else herein) as compared to a corresponding non-target tissue or cell in the subject. The subject can be selected from mouse, rat, monkey, and human. The subject can be a human. In some embodiments, the disease or condition can be a cancer or an inflammatory or autoimmune disease. In some embodiments, the disease or condition can be a cancer. The cancer can be selected from the group consisting of carcinoma, Hodgkin's lymphoma, and non-Hodgkin's lymphoma, diffuse large B cell lymphoma, follicular lymphoma, mantle cell lymphoma, blastoma, breast cancer, ER/PR+ breast cancer, Her2+ breast cancer, triple-negative breast cancer, colon cancer, colon cancer with malignant ascites, mucinous tumors, prostate cancer, head and neck cancer, skin cancer, melanoma, genito-urinary tract cancer, ovarian cancer, ovarian cancer with malignant ascites, peritoneal carcinomatosis, uterine serous carcinoma, endometrial cancer, cervix cancer, colorectal, uterine cancer, mesothelioma in the peritoneum, kidney cancer, Wilm's tumor, lung cancer, small-cell lung cancer, non-small cell lung cancer, gastric cancer, stomach cancer, small intestine cancer, liver cancer, hepatocarcinoma, hepatoblastoma, liposarcoma, pancreatic cancer, gall bladder cancer, cancers of the bile duct, esophageal cancer, salivary gland carcinoma, thyroid cancer, epithelial cancer, arrhenoblastoma, adenocarcinoma, sarcoma, and B-cell derived chronic lymphatic leukemia. In some embodiments, the disease or condition can be an inflammatory or autoimmune disease. The inflammatory or autoimmune disease can be selected from the group consisting of ankylosing spondylitis (AS), arthritis (for example, and not limited to, rheumatoid arthritis (RA), juvenile idiopathic arthritis (JIA), osteoarthritis (OA), psoriatic arthritis (PsA), gout, chronic arthritis), chagas disease, chronic obstructive pulmonary disease (COPD), dermatomyositis, type 1 diabetes, endometriosis, Goodpasture syndrome, Graves' disease, Guillain-Barre syndrome (GB S), Hashimoto's disease, suppurative scab, Kawasaki disease, IgA nephropathy, idiopathic thrombocytopenic purpura, inflammatory bowel disease (IBD) (for example, and not limited to, Crohn's disease (CD), clonal disease, ulcerative colitis, collagen colitis, lymphocytic colitis, ischemic colitis, empty colitis, Behcet's syndrome, infectious colitis, indeterminate colitis, interstitial Cystitis), lupus (for example, and not limited to, systemic lupus erythematosus, discoid lupus, subacute cutaneous lupus erythematosus, cutaneous lupus erythematosus (such as chilblain lupus erythematosus), drug-induced lupus, neonatal lupus, lupus nephritis), mixed connective tissue disease, morphea, multiple sclerosis (MS), severe muscle Force disorder, narcolepsy, neuromuscular angina, pemphigus vulgaris, pernicious anemia, psoriasis, psoriatic arthritis, polymyositis, primary biliary cirrhosis, relapsing polychondritis, schizophrenia, scleroderma, Sjogren's syndrome, systemic stiffness syndrome, temporal arteritis (also known as giant cell arteritis), vasculitis, vitiligo, Wegener's granulomatosis, transplant rejection-associated immune reaction(s) (for example, and not limited to, renal transplant rejection, lung transplant rejection, liver transplant rejection), psoriasis, Wiskott-Aldrich syndrome, autoimmune lymphoproliferative syndrome, myasthenia gravis, inflammatory chronic rhinosinusitis, colitis, celiac disease, Barrett's esophagus, inflammatory gastritis, autoimmune nephritis, autoimmune hepatitis, autoimmune carditis, autoimmune encephalitis, autoimmune mediated hematological disease, asthma, atopic dermatitis, atopy, allergy, allergic rhinitis, scleroderma, bronchitis, pericarditis, the inflammatory disease is, Alzheimer's disease, Parkinson's disease, amyotrophic lateral sclerosis, inflammatory lung disease, inflammatory skin disease, atherosclerosis, myocardial infarction, stroke, gram-positive shock, gram-negative shock, sepsis, septic shock, hemorrhagic shock, anaphylactic shock, systemic inflammatory response syndrome. Additionally or alternatively, the subject designated, by the method described herein in the section entitled “METHODS FOR ASSESSING A LIKELIHOOD OF A RESPONSE TO THERAPEUTIC AGENT(S),” as being likely to respond to the activatable therapeutic agent (such as one described herein) can be one with an expression profile of biomarker(s) such that, upon administering an activatable therapeutic agent (such as one described herein) to the subject, the activatable therapeutic agent is more likely than not to be cleaved at or near the target tissue(s) or cell(s) (such as described herein in the “Target Tissues or Cells” section), e.g., by mammalian protease(s), thereby activating the therapeutic agent. In some embodiments, the method for assessing the likelihood can further comprise transmitting the designation to a healthcare provider and/or the subject. In some embodiments, the method for assessing the likelihood can further comprise, subsequent to (b), contacting the therapeutic agent with the mammalian protease. In some embodiments, the method for assessing the likelihood can further comprise, subsequent to (b), administering to the subject an effective amount of the therapeutic agent based on the designation of step (b). In some embodiments of the method for assessing the likelihood, (a) can comprise detecting the polypeptide of (i), (ii) or (iii) in an immunoassay. The immunoassay can utilize an antibody that specifically binds to the polypeptide of (i), (ii) or (iii), or an epitope thereof. In some embodiments of the method for assessing the likelihood, (a) can comprise detecting the polypeptide of (i), (ii) or (iii) by using a mass spectrometer (MS) (including but not limited to LC-MS, LC-MS/MS, etc.).

### Methods for Preparing Therapeutic Agent(s)

[0410] Provided herein, in some embodiments, is a method for preparing an activatable therapeutic agent, the method comprising:
[0411] (a) culturing a host cell comprising a nucleic acid construct that encodes a recombinant polypeptide under conditions sufficient to express the recombinant polypeptide in the host cell, wherein the recombinant polypeptide comprises a biologically active polypeptide (BP), a release segment (RS), and a masking moiety (MM), wherein:
   [0412] the RS comprises a peptide substrate susceptible for cleavage by a mammalian protease at a scissile bond, wherein the peptide substrate comprises an amino acid sequence having at least 80% sequence identity to a sequence set forth in Column II or III of Table A (or a subset thereof) and/or the group set forth in Tables 1(a)-1(j); and
   [0413] the recombinant polypeptide has a structural arrangement from N-terminus to C-terminus of BP-RS-MM or MM-RS-BP; and
[0414] (b) recovering the activatable therapeutic agent comprising the recombinant polypeptide.

[0415] In some embodiments of the method for preparing the activatable therapeutic agent, the release segment (RS) can be a first release segment (RS1), the peptide substrate can be a first peptide substrate, the scissile bond can be a first scissile bond, the masking moiety (MM) can be a first masking moiety (MM1), and the recombinant polypeptide can further comprise a second release segment (RS2), and a second masking moiety (MM2), where:
[0416] the RS2 comprises a second peptide substrate susceptible for cleavage by a mammalian protease at a second scissile bond, where the second peptide substrate can comprise an amino acid sequence having at least 80% sequence identity to a sequence set forth in Column II or III of Table A (or a subset thereof) and/or the group set forth in Tables 1(a)-1(j); and
[0417] the recombinant polypeptide can have a structural arrangement from N-terminus to C-terminus of MM1-RS1-BP-RS2-MM2, MM1-RS2-BP-RS1-MM2, MM2-RS1-BP-RS2-MM1, or MM2-RS2-BP-RS1-MM1.

[0418] In some embodiments of the method for preparing the activatable therapeutic agent, the masking moiety (MM) can comprise an extended recombinant polypeptide (XTEN) (such as one described hereinabove in the MASKING MOIETIES section or described anywhere else herein). In some embodiments of the method for preparing the activatable therapeutic agent, where the activatable therapeutic agent comprises a first masking moiety (MM1) and a second masking moiety (MM2), one of the MM1 and the MM2 can be a first extended recombinant polypeptide (XTEN1) (such as one described hereinabove in the MASKING MOIETIES section or described anywhere else herein). The other one of the MM1 and the MM2 can comprise a second extended recombinant polypeptide (XTEN2) (such as one described hereinabove in the MASKING MOIETIES section or described anywhere else herein).

[0419] In some embodiments of the method for preparing the activatable therapeutic agent, the recombinant polypeptide can be anyone described herein. The masking moiety (MM), when linked to the recombinant polypeptide, can interfere with an interaction of the biologically active peptide (BP) to a target tissue or cell such that a dissociation constant (K_{d}) of the BP of the recombinant polypeptide with a target cell marker borne by the target tissue or cell can be greater, when the recombinant polypeptide is in an uncleaved state, compared to a dissociation constant (K_{d}) of a corresponding biologically active peptide released from the recombinant polypeptide. The first masking moiety (MM1) and the second masking moiety (MM2), when both linked in the recombinant polypeptide, can (each independently, individually or collectively) interfere with an interaction of the biologically active peptide (BP) to a target tissue or cell such that a dissociation constant (K_{d}) of the BP of the recombinant polypeptide with a target cell marker borne by the target tissue or cell can be greater, when the recombinant polypeptide is in an uncleaved state, compared to a dissociation constant (K_{d}) of a corresponding biologically active peptide, when one or both of the first release segment (RS1) and the second release segment (RS2) is/are cleaved. The dissociation constant (Kd) can be measured in an in vitro assay under equivalent molar concentrations. The in vitro assay can be selected from cell membrane integrity assay, mixed cell culture assay, cell-based competitive binding assay, FACS based propidium Iodide assay, trypan Blue influx assay, photometric enzyme release assay, radiometric 51Cr release assay, fluorometric Europium release assay, CalceinAM release assay, photometric MTT assay, XTT assay, WST-1 assay, alamar blue assay, radiometric 3H-Thd incorporation assay, clonogenic assay measuring cell division activity, fluorometric rhodamine123 assay measuring mitochondrial transmembrane gradient, apoptosis assay monitored by FACS-based phosphatidylserine exposure, ELISA-based TUNEL test assay, sandwich ELISA, caspase activity assay, cell-based LDH release assay, reporter gene activity assay, and cell morphology assay, or any combination thereof.

Methods for Treating Subjects with Therapeutic Agent(s)

[0420] Provided herein, in some embodiments, is a method for treating a subject with an activatable therapeutic agent, the method comprising:
[0421] (a) identifying the subject as having a likelihood of a response to the activatable therapeutic agent based on identification of a peptide biomarker in a biological sample from the subject, which activatable therapeutic agent comprises a peptide substrate susceptible to cleavage by a mammalian protease at a scissile bond; and
[0422] (b) administering the activatable therapeutic agent to the subject based on the identification of the subject in (a);
[0423] wherein the peptide biomarker comprises a portion identical to at least four consecutive amino acid residues of the peptide substrate that is either N-terminal or C-terminal of the scissile bond.

[0424] In some embodiments described in the immediately preceding paragraph, the peptide substrate can be any peptide substrate described hereinabove in the RELEASE SEGMENTS section or described anywhere else herein. The activatable therapeutic agent can be any therapeutic agent (or any activatable therapeutic agent, or any non-natural, activatable therapeutic agent) as described hereinabove in the THERAPEUTIC AGENTS section or described anywhere else herein. The mammalian protease can be any mammalian protease as described hereinabove in the TARGET TISSUES OR CELLS section or described anywhere else herein. The peptide biomarker can be any peptide biomarker as described hereinabove in the TARGET TISSUES OR CELLS section (such as those set forth in Table A) or described anywhere else herein. The likelihood of the response can be determined by a method as described hereinabove in the METHODS FOR ASSESSING A LIKELIHOOD OF A RESPONSE TO THERAPEUTIC AGENT(S) section or described anywhere else herein. The portion containing at least four consecutive amino acid residues can contain at least five, at least six, at least seven, at least eight, at least nine, at least ten, at least eleven, at least twelve, at least thirteen, at least fourteen, or at least fifteen consecutive amino acid residues of the peptide substrate that is either N-terminal or C-terminal of the scissile bond. The portion containing at least four (e.g., at least five, at least six, at least seven, at least eight, at least nine, at least ten, at least eleven, at least twelve, at least thirteen, at least fourteen, or at least fifteen) consecutive amino acid residues of the peptide substrate can be either immediately N-terminal or immediately C-terminal of the scissile bond. Additionally or alternatively, the subject designated, by the method described herein in the section entitled “METHODS FOR ASSESSING A LIKELIHOOD OF A RESPONSE TO THERAPEUTIC AGENT(S),” as being likely to respond to the activatable therapeutic agent (such as one described herein) can be one with an expression profile of biomarker(s) such that, upon administering an activatable therapeutic agent (such as one described herein) to the subject, the activatable therapeutic agent is more likely than not to be cleaved at or near the target tissue(s) or cell(s) (such as described herein in the “Target Tissues or Cells” section), e.g., by mammalian protease(s), thereby activating the therapeutic agent. In some embodiments, the peptide biomarker can be derived from a reporter polypeptide (such as described herein). In some embodiments, the peptide biomarker can have an amino acid sequence that is identical to a sequence of a reporter polypeptide. The reporter polypeptide can comprise a sequence set forth in Columns II-VI of Table A (or a subset thereof). In some embodiments, the peptide substrate can comprise an amino acid sequence having at most three, at most two, or at most one amino acid substitution(s) with respect to a sequence set forth in Column II or III of Table A (or a subset thereof). In some embodiments, none of the amino acid substitution can be at a position corresponding to an amino acid residue immediately adjacent to a corresponding scissile bond as indicated in Table A. In some embodiments, the peptide substrate can comprise an amino acid sequence set forth in Column II or III of Table A (or a subset thereof). In some embodiments, the peptide substrate can comprise an amino acid sequence having at most three, at most two or at most one amino acid substitution(s) with respect to a sequence set forth in Table 1(j). In some embodiments, none of the amino acid substitution can be at a position corresponding to an amino acid residue immediately adjacent to a corresponding scissile bond set forth in Table 1(j). In some embodiments, the peptide substrate can comprise an amino acid sequence set forth in Table 1(j).

[0425] Provided herein, in some embodiments, is a method for treating a subject in need of a therapeutic agent that is activatable by a mammalian protease expressed in the subject, the method comprising:
[0426] administering an effective amount of the therapeutic agent to the subject, wherein the subject has been shown to express in a biological sample from the subject:
   [0427] (i) a polypeptide comprising at least four, at least five, at least six, at least seven, at least eight, at least nine, or at least ten consecutive amino acid residues shown in a sequence set forth in Column V of Table A (or a subset thereof); or
   [0428] (ii) a polypeptide comprising at least four, at least five, at least six, at least seven, at least eight, at least nine, or at least ten consecutive amino acids shown in a sequence set forth in Column IV of Table A (or a subset thereof); or
   [0429] (iii) a polypeptide comprising at least four, at least five, at least six, at least seven, at least eight, at least nine, or at least ten consecutive amino acids shown in a sequence set forth in Column VI of Table A (or a subset thereof); or
   [0430] (iv) expression level of polypeptide (i), (ii) or (iii) exceeds a threshold.

[0431] In some embodiments described in the immediately preceding paragraph, the threshold can be zero or nominal. The peptide substrate can be any peptide substrate described hereinabove in the RELEASE SEGMENTS section or described anywhere else herein. The activatable therapeutic agent can be any therapeutic agent (or any activatable therapeutic agent, or any non-natural, activatable therapeutic agent) as described hereinabove in the THERAPEUTIC AGENTS section or described anywhere else herein. The mammalian protease can be any mammalian protease as described hereinabove in the TARGET TISSUES OR CELLS section or described anywhere else herein. The likelihood of the response can be determined by a method described hereinabove in the METHODS FOR ASSESSING A LIKELIHOOD OF A RESPONSE TO THERAPEUTIC AGENT(S) section or described anywhere else herein. The polypeptide of (i) can comprise at least four, at least five, at least six, at least seven, at least eight, at least nine, or at least ten consecutive amino acid residues shown in a sequence set forth in Column V of Table A (or a subset thereof). The polypeptide of (i) can comprise a sequence set forth in Column V of Table A (or a subset thereof). The polypeptide of (ii) can comprise at least four, at least five, at least six, at least seven, at least eight, at least nine, or at least ten consecutive amino acids shown in a sequence set forth in Column IV of Table A (or a subset thereof). The polypeptide of (ii) can comprise a sequence set forth in Column IV of Table A (or a subset thereof). The polypeptide of (iii) can comprise at least four, at least five, at least six, at least seven, at least eight, at least nine, or at least ten consecutive amino acids shown in a sequence set forth in Column VI of Table A (or a subset thereof). The polypeptide of (iii) can comprise a sequence set forth in Column VI of Table A (or a subset thereof). The therapeutic agent can comprise a peptide substrate susceptible to cleavage by the mammalian protease (e.g., at a scissile bond). The peptide substrate can be susceptible to cleavage by the mammalian protease at a scissile bond, and the polypeptide of (i), (ii), or (iii) can comprise a portion (e.g., containing at least four, at least five, at least six, at least seven, at least eight, at least nine, at least ten, at least eleven, at least twelve, at least thirteen, at least fourteen, or at least fifteen consecutive amino acid residues) of the peptide substrate that is either N-terminal or C-terminal of the scissile bond. The portion (e.g., containing at least four, at least five, at least six, at least seven, at least eight, at least nine, at least ten, at least eleven, at least twelve, at least thirteen, at least fourteen, or at least fifteen consecutive amino acid residues) of the peptide substrate can be either immediately N-terminal or immediately C-terminal of the scissile bond. In some embodiments, the subject has been shown to express in the biological sample any two of (i)-(iii). In some embodiments, the subject has been shown to express in the biological sample all three of (i)-(iii).

[0432] In some embodiments of the method described herein this METHODS FOR TREATING SUBJECTS WITH THERAPEUTIC AGENT(S) section, the biological sample can be selected from serum, plasma, blood, spinal fluid, semen, and saliva. The biological sample can comprise a serum or plasma sample. The biological sample can comprise a serum sample. The biological sample can comprise a plasma sample. The biological sample can comprise a blood sample. The biological sample can comprise a spinal fluid sample. The biological sample can comprise a semen sample. The biological sample can comprise a saliva sample.

[0433] In some embodiments of the method described herein this METHODS FOR TREATING SUBJECTS WITH THERAPEUTIC AGENT(S) section, the subject can be suffering from, or can be suspected of suffering from, a disease or condition characterized by an increased expression or activity of the mammalian protease in proximity to a target tissue or cell (such as one described hereinabove in the TARGET TISSUES OR CELLS section or described anywhere else herein) as compared to a corresponding non-target tissue or cell in the subject. The subject can be selected from mouse, rat, monkey, and human. The subject can be a human. The subject can be determined to have a likelihood of a response to the therapeutic agent or the pharmaceutical composition. The likelihood of the response can be 50% or higher. The likelihood of the response can be determined by a method as described herein (such as one described hereinabove in the METHODS FOR ASSESSING A LIKELIHOOD OF A RESPONSE TO THERAPEUTIC AGENT(S) section). In some embodiments, the disease or condition can be a cancer or an inflammatory or autoimmune disease. In some embodiments, the disease or condition can be a cancer. The cancer can be selected from the group consisting of carcinoma, Hodgkin's lymphoma, and non-Hodgkin's lymphoma, diffuse large B cell lymphoma, follicular lymphoma, mantle cell lymphoma, blastoma, breast cancer, ER/PR+ breast cancer, Her2+ breast cancer, triple-negative breast cancer, colon cancer, colon cancer with malignant ascites, mucinous tumors, prostate cancer, head and neck cancer, skin cancer, melanoma, genito-urinary tract cancer, ovarian cancer, ovarian cancer with malignant ascites, peritoneal carcinomatosis, uterine serous carcinoma, endometrial cancer, cervix cancer, colorectal, uterine cancer, mesothelioma in the peritoneum, kidney cancer, Wilm's tumor, lung cancer, small-cell lung cancer, non-small cell lung cancer, gastric cancer, stomach cancer, small intestine cancer, liver cancer, hepatocarcinoma, hepatoblastoma, liposarcoma, pancreatic cancer, gall bladder cancer, cancers of the bile duct, esophageal cancer, salivary gland carcinoma, thyroid cancer, epithelial cancer, arrhenoblastoma, adenocarcinoma, sarcoma, and B-cell derived chronic lymphatic leukemia. In some embodiments, the disease or condition can be an inflammatory or autoimmune disease. The inflammatory or autoimmune disease can be selected from the group consisting of ankylosing spondylitis (AS), arthritis (for example, and not limited to, rheumatoid arthritis (RA), juvenile idiopathic arthritis (JIA), osteoarthritis (OA), psoriatic arthritis (PsA), gout, chronic arthritis), chagas disease, chronic obstructive pulmonary disease (COPD), dermatomyositis, type 1 diabetes, endometriosis, Goodpasture syndrome, Graves' disease, Guillain-Barre syndrome (GBS), Hashimoto's disease, suppurative scab, Kawasaki disease, IgA nephropathy, idiopathic thrombocytopenic purpura, inflammatory bowel disease (IBD) (for example, and not limited to, Crohn's disease (CD), clonal disease, ulcerative colitis, collagen colitis, lymphocytic colitis, ischemic colitis, empty colitis, Behcet's syndrome, infectious colitis, indeterminate colitis, interstitial Cystitis), lupus (for example, and not limited to, systemic lupus erythematosus, discoid lupus, subacute cutaneous lupus erythematosus, cutaneous lupus erythematosus (such as chilblain lupus erythematosus), drug-induced lupus, neonatal lupus, lupus nephritis), mixed connective tissue disease, morphea, multiple sclerosis (MS), severe muscle Force disorder, narcolepsy, neuromuscular angina, pemphigus vulgaris, pernicious anemia, psoriasis, psoriatic arthritis, polymyositis, primary biliary cirrhosis, relapsing polychondritis, schizophrenia, scleroderma, Sjogren's syndrome, systemic stiffness syndrome, temporal arteritis (also known as giant cell arteritis), vasculitis, vitiligo, Wegener's granulomatosis, transplant rejection-associated immune reaction(s) (for example, and not limited to, renal transplant rejection, lung transplant rejection, liver transplant rejection), psoriasis, Wiskott-Aldrich syndrome, autoimmune lymphoproliferative syndrome, myasthenia gravis, inflammatory chronic rhinosinusitis, colitis, celiac disease, Barrett's esophagus, inflammatory gastritis, autoimmune nephritis, autoimmune hepatitis, autoimmune carditis, autoimmune encephalitis, autoimmune mediated hematological disease, asthma, atopic dermatitis, atopy, allergy, allergic rhinitis, scleroderma, bronchitis, pericarditis, the inflammatory disease is, Alzheimer's disease, Parkinson's disease, amyotrophic lateral sclerosis, inflammatory lung disease, inflammatory skin disease, atherosclerosis, myocardial infarction, stroke, gram-positive shock, gram-negative shock, sepsis, septic shock, hemorrhagic shock, anaphylactic shock, systemic inflammatory response syndrome. Additionally or alternatively, the subject designated, by the method described herein in the section entitled “METHODS FOR ASSESSING A LIKELIHOOD OF A RESPONSE TO THERAPEUTIC AGENT(S),” as being likely to respond to the activatable therapeutic agent (such as one described herein) can be one with an expression profile of biomarker(s) such that, upon administering an activatable therapeutic agent (such as one described herein) to the subject, the activatable therapeutic agent is more likely than not to be cleaved at or near the target tissue(s) or cell(s) (such as described herein in the “Target Tissues or Cells” section), e.g., by mammalian protease(s), thereby activating the therapeutic agent.

### Methods and Uses of Therapeutic Agent(s)

[0434] Provided herein, in some embodiments, is a method for treating a disease or condition in a subject, comprising administering to the subject in need thereof one or more therapeutically effective doses of a therapeutic agent (such as one described herein) or a pharmaceutical composition (such as one described herein). The subject can be selected from mouse, rat, monkey, and human. The subject can be a human. The subject can be determined to have a likelihood of a response to the therapeutic agent or the pharmaceutical composition. The likelihood of the response can be 50% or higher. The likelihood of the response can be determined by a method as described herein (such as one described hereinabove in the METHODS FOR ASSESSING A LIKELIHOOD OF A RESPONSE TO THERAPEUTIC AGENT(S) section). In some embodiments, the disease or condition can be a cancer or an inflammatory or autoimmune disease. In some embodiments, the disease or condition can be a cancer. The cancer can be selected from the group consisting of carcinoma, Hodgkin's lymphoma, and non-Hodgkin's lymphoma, diffuse large B cell lymphoma, follicular lymphoma, mantle cell lymphoma, blastoma, breast cancer, ER/PR+ breast cancer, Her2+ breast cancer, triple-negative breast cancer, colon cancer, colon cancer with malignant ascites, mucinous tumors, prostate cancer, head and neck cancer, skin cancer, melanoma, genito-urinary tract cancer, ovarian cancer, ovarian cancer with malignant ascites, peritoneal carcinomatosis, uterine serous carcinoma, endometrial cancer, cervix cancer, colorectal, uterine cancer, mesothelioma in the peritoneum, kidney cancer, Wilm's tumor, lung cancer, small-cell lung cancer, non-small cell lung cancer, gastric cancer, stomach cancer, small intestine cancer, liver cancer, hepatocarcinoma, hepatoblastoma, liposarcoma, pancreatic cancer, gall bladder cancer, cancers of the bile duct, esophageal cancer, salivary gland carcinoma, thyroid cancer, epithelial cancer, arrhenoblastoma, adenocarcinoma, sarcoma, and B-cell derived chronic lymphatic leukemia. In some embodiments, the disease or condition can be an inflammatory or autoimmune disease. The inflammatory or autoimmune disease can be selected from the group consisting of ankylosing spondylitis (AS), arthritis (for example, and not limited to, rheumatoid arthritis (RA), juvenile idiopathic arthritis (JIA), osteoarthritis (OA), psoriatic arthritis (PsA), gout, chronic arthritis), chagas disease, chronic obstructive pulmonary disease (COPD), dermatomyositis, type 1 diabetes, endometriosis, Goodpasture syndrome, Graves' disease, Guillain-Barre syndrome (GBS), Hashimoto's disease, suppurative scab, Kawasaki disease, IgA nephropathy, idiopathic thrombocytopenic purpura, inflammatory bowel disease (IBD) (for example, and not limited to, Crohn's disease (CD), clonal disease, ulcerative colitis, collagen colitis, lymphocytic colitis, ischemic colitis, empty colitis, Behcet's syndrome, infectious colitis, indeterminate colitis, interstitial Cystitis), lupus (for example, and not limited to, systemic lupus erythematosus, discoid lupus, subacute cutaneous lupus erythematosus, cutaneous lupus erythematosus (such as chilblain lupus erythematosus), drug-induced lupus, neonatal lupus, lupus nephritis), mixed connective tissue disease, morphea, multiple sclerosis (MS), severe muscle Force disorder, narcolepsy, neuromuscular angina, pemphigus vulgaris, pernicious anemia, psoriasis, psoriatic arthritis, polymyositis, primary biliary cirrhosis, relapsing polychondritis, schizophrenia, scleroderma, Sjogren's syndrome, systemic stiffness syndrome, temporal arteritis (also known as giant cell arteritis), vasculitis, vitiligo, Wegener's granulomatosis, transplant rejection-associated immune reaction(s) (for example, and not limited to, renal transplant rejection, lung transplant rejection, liver transplant rejection), psoriasis, Wiskott-Aldrich syndrome, autoimmune lymphoproliferative syndrome, myasthenia gravis, inflammatory chronic rhinosinusitis, colitis, celiac disease, Barrett's esophagus, inflammatory gastritis, autoimmune nephritis, autoimmune hepatitis, autoimmune carditis, autoimmune encephalitis, autoimmune mediated hematological disease, asthma, atopic dermatitis, atopy, allergy, allergic rhinitis, scleroderma, bronchitis, pericarditis, the inflammatory disease is, Alzheimer's disease, Parkinson's disease, amyotrophic lateral sclerosis, inflammatory lung disease, inflammatory skin disease, atherosclerosis, myocardial infarction, stroke, gram-positive shock, gram-negative shock, sepsis, septic shock, hemorrhagic shock, anaphylactic shock, systemic inflammatory response syndrome. Additionally or alternatively, the subject designated, by the method described herein in the section entitled “METHODS FOR ASSESSING A LIKELIHOOD OF A RESPONSE TO THERAPEUTIC AGENT(S),” as being likely to respond to the activatable therapeutic agent (such as one described herein) can be one with an expression profile of biomarker(s) such that, upon administering an activatable therapeutic agent (such as one described herein) to the subject, the activatable therapeutic agent is more likely than not to be cleaved at or near the target tissue(s) or cell(s) (such as described herein in the “Target Tissues or Cells” section), e.g., by mammalian protease(s), thereby activating the therapeutic agent.

[0435] Provided herein, in some embodiments, is use of a therapeutic agent (such as one described herein) or a pharmaceutical composition (such as one described herein) in the preparation of a medicament for the treatment of a disease or condition in a subject. The subject can be selected from mouse, rat, monkey, and human. The subject can be a human. The subject can be determined to have a likelihood of a response to the therapeutic agent or the pharmaceutical composition. The likelihood of the response can be 50% or higher. The likelihood of the response can be determined by a method as described herein (such as one described hereinabove in the METHODS FOR ASSESSING A LIKELIHOOD OF A RESPONSE TO THERAPEUTIC AGENT(S) section). In some embodiments, the disease or condition can be a cancer or an inflammatory or autoimmune disease. In some embodiments, the disease or condition can be a cancer. The cancer can be selected from the group consisting of carcinoma, Hodgkin's lymphoma, and non-Hodgkin's lymphoma, diffuse large B cell lymphoma, follicular lymphoma, mantle cell lymphoma, blastoma, breast cancer, ER/PR+ breast cancer, Her2+ breast cancer, triple-negative breast cancer, colon cancer, colon cancer with malignant ascites, mucinous tumors, prostate cancer, head and neck cancer, skin cancer, melanoma, genito-urinary tract cancer, ovarian cancer, ovarian cancer with malignant ascites, peritoneal carcinomatosis, uterine serous carcinoma, endometrial cancer, cervix cancer, colorectal, uterine cancer, mesothelioma in the peritoneum, kidney cancer, Wilm's tumor, lung cancer, small-cell lung cancer, non-small cell lung cancer, gastric cancer, stomach cancer, small intestine cancer, liver cancer, hepatocarcinoma, hepatoblastoma, liposarcoma, pancreatic cancer, gall bladder cancer, cancers of the bile duct, esophageal cancer, salivary gland carcinoma, thyroid cancer, epithelial cancer, arrhenoblastoma, adenocarcinoma, sarcoma, and B-cell derived chronic lymphatic leukemia. In some embodiments, the disease or condition can be an inflammatory or autoimmune disease. The inflammatory or autoimmune disease can be selected from the group consisting of ankylosing spondylitis (AS), arthritis (for example, and not limited to, rheumatoid arthritis (RA), juvenile idiopathic arthritis (JIA), osteoarthritis (OA), psoriatic arthritis (PsA), gout, chronic arthritis), chagas disease, chronic obstructive pulmonary disease (COPD), dermatomyositis, type 1 diabetes, endometriosis, Goodpasture syndrome, Graves' disease, Guillain-Barre syndrome (GB S), Hashimoto's disease, suppurative scab, Kawasaki disease, IgA nephropathy, idiopathic thrombocytopenic purpura, inflammatory bowel disease (IBD) (for example, and not limited to, Crohn's disease (CD), clonal disease, ulcerative colitis, collagen colitis, lymphocytic colitis, ischemic colitis, empty colitis, Behcet's syndrome, infectious colitis, indeterminate colitis, interstitial Cystitis), lupus (for example, and not limited to, systemic lupus erythematosus, discoid lupus, subacute cutaneous lupus erythematosus, cutaneous lupus erythematosus (such as chilblain lupus erythematosus), drug-induced lupus, neonatal lupus, lupus nephritis), mixed connective tissue disease, morphea, multiple sclerosis (MS), severe muscle Force disorder, narcolepsy, neuromuscular angina, pemphigus vulgaris, pernicious anemia, psoriasis, psoriatic arthritis, polymyositis, primary biliary cirrhosis, relapsing polychondritis, schizophrenia, scleroderma, Sjogren's syndrome, systemic stiffness syndrome, temporal arteritis (also known as giant cell arteritis), vasculitis, vitiligo, Wegener's granulomatosis, transplant rejection-associated immune reaction(s) (for example, and not limited to, renal transplant rejection, lung transplant rejection, liver transplant rejection), psoriasis, Wiskott-Aldrich syndrome, autoimmune lymphoproliferative syndrome, myasthenia gravis, inflammatory chronic rhinosinusitis, colitis, celiac disease, Barrett's esophagus, inflammatory gastritis, autoimmune nephritis, autoimmune hepatitis, autoimmune carditis, autoimmune encephalitis, autoimmune mediated hematological disease, asthma, atopic dermatitis, atopy, allergy, allergic rhinitis, scleroderma, bronchitis, pericarditis, the inflammatory disease is, Alzheimer's disease, Parkinson's disease, amyotrophic lateral sclerosis, inflammatory lung disease, inflammatory skin disease, atherosclerosis, myocardial infarction, stroke, gram-positive shock, gram-negative shock, sepsis, septic shock, hemorrhagic shock, anaphylactic shock, systemic inflammatory response syndrome. Additionally or alternatively, the subject designated, by the method described herein in the section entitled “METHODS FOR ASSESSING A LIKELIHOOD OF A RESPONSE TO THERAPEUTIC AGENT(S),” as being likely to respond to the activatable therapeutic agent (such as one described herein) can be one with an expression profile of biomarker(s) such that, upon administering an activatable therapeutic agent (such as one described herein) to the subject, the activatable therapeutic agent is more likely than not to be cleaved at or near the target tissue(s) or cell(s) (such as described herein in the “Target Tissues or Cells” section), e.g., by mammalian protease(s), thereby activating the therapeutic agent.

### EXAMPLES

### Example 1. Recombinant Production of an XTENylated Fusion Polypeptide Containing an Exemplary Peptide Substrate

[0436] This example illustrates recombinant construction, production, and purification of an XTENylated fusion polypeptide containing an exemplary peptide substrate using the methods disclosed herein.

[0437] EXPRESSION: Constructs encoding an XTENylated fusion polypeptide comprising an amino acid sequence of SEQ ID NO: 20 or 22, containing two elastin-based peptide substrates, both of the sequence GPGG-VAAA (SEQ ID NO: 1283) (shown in #527 of Column II of Table A), are expressed in a proprietary E. coli AmE098 strain and partitioned into the periplasm via an N-terminal secretory leader sequence (MKKNIAFLLASMFVFSIATNAYA-) (SEQ ID NO: 3129), which is cleaved during translocation. Fermentation cultures are grown with animal-free complex medium at 37° C.; and the temperature is shifted to 26° C. prior to phosphate depletion. During harvest, fermentation whole broth is centrifuged to pellet the cells. At harvest, the total volume and the wet cell weight (WCW; ratio of pellet to supernatant) is recorded, and the pelleted cells are collected and frozen at −80° C.

[0438] RECOVERY: The frozen cell pellet is resuspended in Lysis Buffer (17.7 mM citric acid, 22.3 mM Na₂HPO₄, 75 mM NaCl, 2 mM EDTA, pH 4.0) targeting 30% wet cell weight. The resuspension is allowed to equilibrate at pH 4 then homogenized via two passes at 800±50 bar while output temperature is monitored and maintained at 15±5° C. The pH of the homogenate is confirmed to be within the specified range (pH 4.0±0.2).

[0439] CLARIFICATION: To reduce endotoxin and host cell impurities, the homogenate is allowed to undergo low-temperature (10±5° C.), acidic (pH 4.0±0.2) flocculation overnight (15-20 hours). To remove the insoluble fraction, the flocculated homogenate is centrifuged for 40 minutes at 16,900 RCF at 2-8° C., and the supernatant is retained. The supernatant is diluted approximately 3-fold with Milli-Q water (MQ), then adjusted to 7±1 mS/cm with 5 M NaCl. To remove nucleic acid, lipids, and endotoxin and to act as a filter aid, the supernatant is adjusted to 0.1% (m/m) diatomaceous earth. To keep the filter aid suspended, the supernatant is mixed via impeller and allowed to equilibrate for 30 minutes. A filter train, consisting of a depth filter followed by a 0.22 μm filter, is assembled then flushed with MQ. The supernatant is pumped through the filter train while modulating flow to maintain a pressure drop of 25±5 psig. To adjust the composite buffer system (based on the ratio of citric acid and Na₂HPO₄) to the desired range for capture chromatography, the filtrate is adjusted with 500 mM Na₂HPO₄ such that the final ratio of Na₂HPO₄ to citric acid is 9.33:1, and the pH of the buffered filtrate is confirmed to be within the specified range (pH 7.0±0.2).

[0440] Purification

[0441] AEX Capture: To separate dimer, aggregate, and large truncates from monomeric product, and to remove endotoxin and nucleic acids, anion exchange (AEX) chromatography is utilized to capture the electronegative C-terminal XTEN domain. The AEX1 stationary phase (GE Q Sepharose FF), AEX1 mobile phase A (12.2 mM Na₂HPO₄, 7.8 mM Na₂HPO₄, 40 mM NaCl), and AEX1 mobile phase B (12.2 mM Na₂HPO₄, 7.8 mM Na₂HPO₄, 500 mM NaCl) are used herein. The column is equilibrated with AEX1 mobile phase A. Based on the total protein concentration measured by bicinchoninic acid (BCA) assay, the filtrate is loaded onto the column targeting 28±4 g/L-resin, chased with AEX1 mobile phase A, then washed with a step to 30% B. Bound material is eluted with a gradient from 30% B to 60% B over 20 CV. Fractions are collected in 1 CV aliquots while A220≥100 mAU above (local) baseline. Elution fractions are analyzed and pooled on the basis of SDS-PAGE and SE-HPLC.

[0442] IMAC Intermediate Purification: To ensure C-terminal integrity, immobilized metal affinity chromatography (IMAC) is used to capture the C-terminal polyhistidine tag (His(6)). The IMAC stationary phase (GE IMAC Sepharose FF), IMAC mobile phase A (18.3 mM Na₂HPO₄, 1.7 mM Na₂HPO₄, 500 mM NaCl, 1 mM imidazole), and IMAC mobile phase B (18.3 mM Na₂HPO₄, 1.7 mM Na₂HPO₄, 500 mM NaCl, 500 mM imidazole) are used herein. The column is charged with zinc solution and equilibrated with IMAC mobile phase A. The AEX1 Pool is adjusted to pH 7.8±0.1, 50±5 mS/cm (with 5 M NaCl), and 1 mM imidazole, loaded onto the IMAC column targeting 2 g/L-resin, and chased with IMAC mobile phase A until absorbance at 280 nm (A280) returned to (local) baseline. Bound material is eluted with a step to 25% IMAC mobile phase B. The IMAC Elution collection is initiated when A280≥10 mAU above (local) baseline, directed into a container pre-spiked with EDTA sufficient to bring 2 CV to 2 mM EDTA, and terminated once 2 CV were collected. The elution is analyzed by SDS-PAGE.

[0443] Protein-L Intermediate Purification: To ensure N-terminal integrity, Protein-L is used to capture kappa domains present close to the N-terminus of the fusion polypeptide (specifically the aEpCAM scFv). Protein-L stationary phase (GE Capto L), Protein-L mobile phase A (16.0 mM citric acid, 20.0 mM Na₂HPO₄, pH 4.0±0.1), Protein-L mobile phase B (29.0 mM citric acid, 7.0 mM Na₂HPO₄, pH 2.60±0.02), and Protein-L mobile phase C (3.5 mM citric acid, 32.5 mM Na₂HPO₄, 250 mM NaCl, pH 7.0±0.1) are used herein. The column is equilibrated with Protein-L mobile phase C. The IMAC Elution is adjusted to pH 7.0±0.1 and 30±3 mS/cm (with 5 M NaCl and MQ) and loaded onto the Protein-L column targeting 2 g/L-resin then chased with Protein-L mobile phase C until absorbance at 280 nm (A280) returns to (local) baseline. The column is washed with Protein-L mobile phase A, and Protein-L mobile phases A and B are used to effect low-pH elution. Bound material is eluted at approximately pH 3.0 and collected into a container pre-spiked with one part 0.5 M Na₂HPO₄ for every 10 parts collected volume. Fractions are analyzed by SDS-PAGE.

[0444] HIC Polishing: To separate N-terminal variants (4 residues at the absolute N-terminus are not essential for Protein-L binding) and overall conformation variants, hydrophobic interaction chromatography (HIC) is used. HIC stationary phase (GE Capto Phenyl ImpRes), HIC mobile phase A (20 mM histidine, 0.02% (w/v) polysorbate 80, pH 6.5±0.1) and HIC mobile phase B (1 M ammonium sulfate, 20 mM histidine, 0.02% (w/v) polysorbate 80, pH 6.5±0.1) are used herein. The column is equilibrated with HIC mobile phase B. The adjusted Protein-L Elution is loaded onto the HIC column targeting 2 g/L-resin and chased with HIC mobile phase B until absorbance at 280 nm (A280) returned to (local) baseline. The column is washed with 50% B. Bound material is eluted with a gradient from 50% B to 0% B over 75 CV. Fractions are collected in 1 CV aliquots while A280≥3 mAU above (local) baseline. Elution fractions are analyzed and pooled on the basis of SE-HPLC and HI-HPLC.

[0445] FORMULATION: To exchange the product into formulation buffer and to bring the product to the target concentration (0.5 g/L), anion exchange is again used to capture the C-terminal XTEN. AEX2 stationary phase (GE Q Sepharose FF), AEX2 mobile phase A (20 mM histidine, 40 mM NaCl, 0.02% (w/v) polysorbate 80, pH 6.5±0.2), AEX2 mobile phase B (20 mM histidine, 1 M NaCl, 0.02% (w/v) polysorbate 80, pH 6.5±0.2), and AEX2 mobile phase C (12.2 mM Na₂HPO₄, 7.8 mM NaH₂PO₄, 40 mM NaCl, 0.02% (w/v) polysorbate 80, pH 7.0±0.2) are used herein. The column is equilibrated with AEX2 mobile phase C. The HIC Pool is adjusted to pH 7.0±0.1 and 7±1 mS/cm (with MQ) and loaded onto the AEX2 column targeting 2 g/L-resin then chased with AEX2 mobile phase C until A280 returned to (local) baseline. The column is washed with AEX2 mobile phase A (20 mM histidine, 40 mM NaCl, 0.02% (w/v) polysorbate 80, pH 6.5±0.2). AEX2 mobile phases A and B are used to generate an [NaCl] step and effect elution. Bound material is eluted with a step to 38% AEX2 mobile phase B. The AEX2 Elution collection is initiated when A280≥5 mAU above (local) baseline and terminated once 2 CV were collected. The AEX2 Elution is 0.22 μm filtered within a BSC, aliquoted, labeled, and stored at −80° C. as Bulk Drug Substance (BDS). The bulk drug substance (BDS) is confirmed by various analytical methods to meet all lot release criteria. Overall quality is analyzed by SDS-PAGE, the ratio of monomer to dimer and aggregate is analyzed by SE-HPLC, and N-terminal quality and product homogeneity are analyzed by HI-HPLC.

### Example 2. Preparation of Plasma Samples

[0446] This example illustrates preparation of plasma samples from patients suffering from, or is suspected of suffering from, a disease or condition known to be associated with an elevated level of elastin at or near a diseased site.

[0447] Blood is collected from a patient of choice into an EDTA plasma tube and centrifuged for 10 minutes at 4° C. and 3,500 g. Plasma is then aliquoted and flash-frozen on dry ice within 30 minutes of collection. 250 μL aliquots of plasma are later thawed on ice and precipitated with 1 mL of water containing 80% acetonitrile and 1 nanogram (ng) of bovine insulin as an internal standard. The solid phase extraction eluant is transferred and evaporated to dryness, then diluted with 75 μL of water with 0.1% formic acid, thereby obtaining a sample of plasma peptides.

[0448] Possible variations in sample preparation, including those for a nano LC/MS, may be found in Kay et al. 2018 (Rapid Communications in Mass Spectrometry 32 (16), 1414-1424, 2018.

### Example 3. Liquid Chromatography-Mass Spectrometry (LC-MS)

[0449] This example illustrates liquid chromatography-mass spectrometry (LC-MS) methods used to determine the presence and/or amount of biomarker peptides in plasma samples from subjects using the methods disclosed herein.

[0450] 50 μL of the plasma peptides as obtained according to Example 2 is injected into a liquid chromatography-mass spectrometry (LC-MS) system with a high flow configuration. Two buffers, buffer A (0.1% formic acid in water) and buffer B (0.1% formic acid in 80:20 acetonitrile/water), for liquid chromatography (LC) separations are prepared. 50 μL of sample extract is injected into a HSS T3 column (2.1×50 mm) at 15% buffer A and 85% buffer B with a flow rate of 300 μL/min, then separated to 40% buffer B using a 6.5 minute gradient. The column is then washed at 90% buffer B for 1.5 minutes and returned to initial conditions after 8 minutes. A scan from 600 mass per charge (m/z) to 1,600 m/z is conducted for information-dependent acquisition using a resolution of 75,000, a maximum fill time of 200 ms, and an automatic gain control of 3×10⁶.

[0451] Peptides are identified using Peaks 8.0 software searched against the human Swissprot database. The search configuration includes precursor and product ion tolerances of 10 ppm and 0.05 Da (respectively), the no-digest setting, a false discovery rate threshold of 1%, and allowance of modifications such as C-terminal amidation.

### Example 4. Matrix-Assisted Laser Desorption/Ionization-Time of Flight (MALDI-TOF) Mass Spectrometry

[0452] This example illustrates matrix-assisted laser desorption/ionization-time of flight (MALDI-TOF) mass spectrometry methods used to determine the presence and/or amount of biomarker peptides in plasma samples from subjects using the methods disclosed herein.

[0453] As an alternative to Example 3, plasma peptides obtained according to Example 2 is isolated by loading plasma samples, mixed in a 3:1 ratio with a solution of 20% acetonitrile and 1% trifluoroacetic acid, onto nanoporous silica chips for analysis by a matrix-assisted laser desorption/ionization-time of flight (MALDI-TOF) mass spectrometer, as described in details in Bedin et al. 2015 (J Cell Physiol., 231(4):915-25). The plasma peptides are identified using Mascot and MS-Tag search engines with preprocessing steps performed by flexAnalysis and Snap™ softwares. The presence or/and amount of the plasma peptides having (i) a sequence of GVAPGIGPGG (shown in #527 of column IV of Table A), or (ii) a sequence of VAAAAKSAAK (SEQ ID NO. 3116; shown in #527 of column VI of Table A) (or a fragment thereof) is determined.

### Example 5. Enzyme-Linked Immunosorbent Assay (ELISA)

[0454] This example illustrates immunoassay methods used to determine the presence and/or amount of biomarker peptides in plasma samples from subjects using the methods disclosed herein.

[0455] Capture antibodies specific to one or more biomarker(s) of (i) a sequence of GVAPGIGPGG (SEQ ID NO: ) (shown in #527 of column IV of Table A), (ii) a sequence of VAAAAKSAAK (SEQ ID NO: ) (shown in #527 of column VI of Table A), and (iii) a sequence of GPGGVAAA (SEQ ID NO: ) (shown in #527 of column II of Table A) (or a fragment thereof) are obtained.

[0456] The plasma sample obtained according to Example 2 is diluted and the plasma concentrations of the biomarker peptide(s) are measured using a competitive ELISA. Primary antibody (unlabeled) is incubated with sample antigen. Antibody-antigen complexes are then added to 96-well plates which are pre-coated with the same antigen. Unbound antibody is removed by washing the plate. (The more antigen in the sample, the less antibody will be able to bind to the antigen in the well, hence “competition.”) The secondary antibody that is specific to the primary antibody and conjugated with an enzyme is added. A substrate is added, and remaining enzymes elicit a chromogenic or fluorescent signal.

### Example 6. Patient Designations

[0457] This example illustrates designating patients as being likely to respond to activatable therapeutic agents using the methods disclosed herein.

[0458] The presence or/and amount of biomarker peptide(s) as determined according to one of Examples 3-5 is analyzed manually or with semi-automated/automated procedures/instruments. If the biomarker peptide(s) is/determined to be present in the plasma sample from the patient, or if the amount of biomarker peptide(s) of the patient is determined to exceed a pre-determined threshold, the patient is designated as having a likeliness of more than 50% to respond to the therapeutic agent constructed and produced according to Example 1 which comprises the elastin-based peptide substrate (shown in #527 of Column II of Table A) in its release segment.

### Example 7. Assessment of Protease Cleavage of Release Segments Having Collagen I Derived Amino Acid Sequences

[0459] This invention provides non-natural, activatable therapeutic agents (e.g. XPATs) wherein a biologically active moiety (BM) is preferentially released at a target site associated with expression of a mammalian protease that cleaves a scissile bond in a release segment linked directly or indirectly to the BM. Successful therapeutic use of these agents in an individual depends on whether the agent comprises a release segment linked directly or indirectly to the BM that is cleaved by a mammalian protease expressed at a target site in that individual. An assessment of whether an individual having a target site to be targeted for delivery and release of the BM expresses a mammalian protease that cleaves a release segment can be valuable in identifying and matching therapeutically effective agents for a particular individual. Achieving such a beneficial assessment is dependent on determining the relative efficiency of cleavage of release segment sequences by mammalian proteases known to be expressed at therapeutic target sites, such as tumors and inflammatory sites.

[0460] Set forth in this example are the results of experiments that demonstrated unmasking rates of ECP-based release sites. The substrates 818-P1, C1MA, and C1 MB were digested by proteases and cleavage rates measured.

[0461] Protease digestion was performed under varying conditions and were based on comparison of 818-C1MA and 818-C1 MB to 818-P1 digestion. Substrate (1 μM) was digested at 37° C. with MMPs for two hours, Legumain and ST14 for four hours, or Urokinase-type Plasminogen Activator (uPA) for 6 hours as shown in Table 8. Digestion buffers varied in composition and enzyme concentration, MMP (5 nM), Legumain, ST14 (50 nM) and uPA (100 nM). Cleavage of 818-P1, C1MA and C1 MB at lysine/leucine residues similar to collagen (a known component of the extracellular matrix, ECM) are demonstrated in FIG. 9.

[0462] Results demonstrated that MMP 2, 7, and 9 unmasked 818-P1 faster than 818-C1MA and 818-C1 MB (MMP2: 818-P1>818-C1MA>818-C1 MB; MMP1: 818-P1>818-C1MA=818-C1 MB; MMP9: 818-P1>818-C1 MB>818-C1MA). Legumain and ST 14 required a higher concentration and longer time for unmasking. Legumain demonstrated minimal unmasking differences whereas ST14 unmaking was characterized by 818-C1MA>818-P1>818-C1 MB. Unmasking activity attributable to uPA required higher concentrations of proteases and longer digestion times.

[0463] Proteases expressed during cancer growth and metastasis remodel the ECM and can lead to elevated plasma levels of ECM protein cleavage products that are elevated in the plasma of patients with a wide variety of tumors. The current example demonstrates that a cleavage product resulting from MMP cleavage of an ECM protein is highly similar to the MMP cleavage site in protease-cleavable linkers in XPATs. These results demonstrated that the protease cleavable linker employed in the XPATs of this invention are more efficiently cleaved than the ECM by purified MMPs and that the presence of ECM peptides in cancer patients can serve as an indicator that the patients' tumors are expressing MMPs that can cleave the protease-cleavable linker in an XPAT, thereby predicting whether a given patient or tumor will be able to cleave the XPAT and hence result in treatment of the tumor. This allows for a personalized approach to determine whether an XPAT will be cleaved in a given tumor type by determining whether the subject that has said tumor type has elevated plasma levels of certain cleavage product(s) derived from the extracellular matrix.

TABLE 8
Protease Sources and Partial Digest Conditions

| | Protease | | |
|---|---|---|---|
| | Conc | Time | |
| Protease | (nM) | (hr) | Digest Buffer |
| MMP2 | 5 | 2 | 20 mM Histidine, 154 mM NaCl, |
| | | | 0.005% PS-80, 10 mM CaCl2, pH 6.5 |
| MMP7 | 5 | 2 | 20 mM Histidine, 154 mM NaCl, |
| | | | 0.005% PS-80, 10 mM CaCl2, pH 6.5 |
| MMP9 | 5 | 2 | 20 mM Histidine, 154 mM NaCl, |
| | | | 0.005% PS-80, 10 mM CaCl2, pH 6.5 |
| Legumain | 50 | 4 | 50 mM MES, 250 mM NaCl, pH 5.0 |
| ST14/ | 50 | 4 | 20 mM Histidine, 154 mM NaCl, |
| Matriptase | | | 0.005% PS-80, 10 mM CaCl2, pH 6.5 |
| uPA | 100 | 6 | 50 mM Tris-HCl, pH 8.0 |
| Trypsin | N/A (~20 μL | 0.5-2 | PBS |
| (immo- | slurry/ | | |
| bilized) | 100 μL) | | |

TABLE 9
Protease Cleavage Release Segment Sequences

| Name | SEQ ID NO | Sequence |
|---|---|---|
| Collagen I | 3124 | GADGSPGKDGVRGLTGPIGPPGP |
| 818-NonClv | 3225 | APTTGEAGEAAGATSAGATGPATSGS |
| AMX-818 | 3126 | GGSAPEAGRSANHTPAGLTGPATSGS |
| AC2566 | 3127 | GGSAPEAGRSANHGVRGLTGPATSGS |
| AC2567 | 3128 | GGSAPEAGSPGKDGVRGLTGPATSGS |

[0464] While preferred embodiments of the present invention have been shown and described herein, it will be obvious to those skilled in the art that such embodiments are provided by way of example only. It is not intended that the invention be limited by the specific examples provided within the specification. While the invention has been described with reference to the aforementioned specification, the descriptions and illustrations of the embodiments herein are not meant to be construed in a limiting sense. Numerous variations, changes, and substitutions will now occur to those skilled in the art without departing from the invention. Furthermore, it shall be understood that all aspects of the invention are not limited to the specific depictions, configurations or relative proportions set forth herein which depend upon a variety of conditions and variables. It should be understood that various alternatives to the embodiments of the invention described herein may be employed in practicing the invention. It is therefore contemplated that the invention shall also cover any such alternatives, modifications, variations or equivalents. It is intended that the following claims define the scope of the invention and that methods and structures within the scope of these claims and their equivalents be covered thereby.

The application's sequence listing, which the Patent Office published only in electronic form, follows.

SEQUENCE LISTING (3129 sequences)

SEQ ID NO: 1 - protein, 16 aa, synthetic construct
  REGION 1..16: note = Synthetic
GPGGVAAAVSKRFPVG

SEQ ID NO: 2 - protein, 16 aa, synthetic construct
  REGION 1..16: note = Synthetic
GVRGLTGPVSKRFPVG

SEQ ID NO: 3 - protein, 16 aa, synthetic construct
  REGION 1..16: note = Synthetic
VSKRFPVGEAGRSANH

SEQ ID NO: 4 - protein, 16 aa, synthetic construct
  REGION 1..16: note = Synthetic
EAGRSANHGVRGLTGP

SEQ ID NO: 5 - protein, 16 aa, synthetic construct
  REGION 1..16: note = Synthetic
EAGRSANHTPAGLTGP

SEQ ID NO: 6 - protein, 16 aa, synthetic construct
  REGION 1..16: note = Synthetic
SPEAQAAAEAGRSANH

SEQ ID NO: 7 - protein, 16 aa, synthetic construct
  REGION 1..16: note = Synthetic
QPAHLTFPEAGRSANH

SEQ ID NO: 8 - protein, 15 aa, synthetic construct
  REGION 1..15: note = Synthetic
AGSPGKDGVRGLTGP

SEQ ID NO: 9 - protein, 1445 aa, synthetic construct
  REGION 1..1445: note = Synthetic
ASHHHHHHSPAGSPTSTEEGTSESATPESGPGTSTEPSEGSAPGTSESATPESGPGSEPATSGSETPGTSESATPESGPGSEPATSGSETPGTSESATPESGPGTSTEPSEGSAPGSPAGSPTSTEEGTSESATPESGPGSEPATSGSETPGTSESATPESGPGSPAGSPTSTEEGSPAGSPTSTEEGTSTEPSEGSAPGTSESATPESGPGTSESATPESGPGTSESATPESGPGSEPATSGSETPGSEPATSGSETPGSPAGSPTSTEEGTSTEPSEGSAPGTSTEPSEGSAPGGSAPGPSGHMGRATSGSETPGTDIQMTQSPSSLSASVGDRVTITCKASQDVSIGVAWYQQKPGKAPKLLIYSASYRYTGVPSRFSGSGSGTDFTLTISSLQPEDFATYYCQQYYIYPYTFGQGTKVEIKGATPPETGAETESPGETTGGSAESEPPGEGEVQLVESGGGLVQPGGSLRLSCAASGFTFTDYTMDWVRQAPGKGLEWVADVNPNSGGSIYNQRFKGRFTLSVDRSKNTLYLQMNSLRAEDTAVYYCARNLGPSFYFDYWGQGTLVTVSSGGGGSELVVTQEPSLTVSPGGTVTLTCRSSNGAVTSSNYANWVQQKPGQAPRGLIGGTNKRAPGTPARFSGSLLGGKAALTLSGVQPEDEAVYYCALWYPNLWVFGGGTKLTVLGATPPETGAETESPGETTGGSAESEPPGEGEVQLLESGGGIVQPGGSLKLSCAASGFTFNTYAMNWVRQAPGKGLEWVARIRSKYNNYATYYADSVKDRFTISRDDSKNTVYLQMNNLKTEDTAVYYCVRHENFGNSYVSWFAHWGQGTLVTVSSGTAEAASASGGPSGHMGRPGSPAGSPTSTEEGTSESATPESGPGTSTEPSEGSAPGSPAGSPTSTEEGTSTEPSEGSAPGTSTEPSEGSAPGTSESATPESGPGSEPATSGSETPGSEPATSGSETPGSPAGSPTSTEEGTSESATPESGPGTSTEPSEGSAPGTSTEPSEGSAPGSPAGSPTSTEEGTSTEPSEGSAPGTSTEPSEGSAPGTSESATPESGPGTSTEPSEGSAPGTSESATPESGPGSEPATSGSETPGTSTEPSEGSAPGTSTEPSEGSAPGTSESATPESGPGTSESATPESGPGSPAGSPTSTEEGTSESATPESGPGSEPATSGSETPGTSESATPESGPGTSTEPSEGSAPGTSTEPSEGSAPGTSTEPSEGSAPGTSTEPSEGSAPGTSTEPSEGSAPGTSTEPSEGSAPGSPAGSPTSTEEGTSTEPSEGSAPGTSESATPESGPGSEPATSGSETPGTSESATPESGPGSEPATSGSETPGTSESATPESGPGTSTEPSEGSAPGTSESATPESGPGSPAGSPTSTEEGSPAGSPTSTEEGSPAGSPTSTEEGTSESATPESGPGTSTEPSEGSAPGAAEPEA

SEQ ID NO: 10 - protein, 1445 aa, synthetic construct
  REGION 1..1445: note = Synthetic
ASHHHHHHSPAGSPTSTEEGTSESATPESGPGTSTEPSEGSAPGTSESATPESGPGSEPATSGSETPGTSESATPESGPGSEPATSGSETPGTSESATPESGPGTSTEPSEGSAPGSPAGSPTSTEEGTSESATPESGPGSEPATSGSETPGTSESATPESGPGSPAGSPTSTEEGSPAGSPTSTEEGTSTEPSEGSAPGTSESATPESGPGTSESATPESGPGTSESATPESGPGSEPATSGSETPGSEPATSGSETPGSPAGSPTSTEEGTSTEPSEGSAPGTSTEPSEGSAPGGSAPHPVELLARATSGSETPGTDIQMTQSPSSLSASVGDRVTITCQASQDISNYLNWYQQKPGKAPKLLIYDASNLETGVPSRFSGSGSGTDFTFTISSLQPEDIATYFCQHFDHLPLAFGGGTKVEIKGATPPETGAETESPGETTGGSAESEPPGEGQVQLQESGPGLVKPSETLSLTCTVSGGSVSSGDYYWTWIRQSPGKGLEWIGHIYYSGNTNYNPSLKSRLTISIDTSKTQFSLKLSSVTAADTAIYYCVRDRVTGAFDIWGQGTMVTVSSGGGGSELVVTQEPSLTVSPGGTVTLTCRSSTGAVTTSNYANWVQQKPGQAPRGLIGGTNKRAPGTPARFSGSLLGGKAALTLSGVQPEDEAEYYCALWYSNLWVFGGGTKLTVLGATPPETGAETESPGETTGGSAESEPPGEGEVQLLESGGGLVQPGGSLKLSCAASGFTFNTYAMNWVRQAPGKGLEWVARIRSKYNNYATYYADSVKDRFTISRDDSKNTAYLQMNNLKTEDTAVYYCVRHGNFGNSYVSWFAYWGQGTLVTVSSGTAEAASASGHPVELLARPGSPAGSPTSTEEGTSESATPESGPGTSTEPSEGSAPGSPAGSPTSTEEGTSTEPSEGSAPGTSTEPSEGSAPGTSESATPESGPGSEPATSGSETPGSEPATSGSETPGSPAGSPTSTEEGTSESATPESGPGTSTEPSEGSAPGTSTEPSEGSAPGSPAGSPTSTEEGTSTEPSEGSAPGTSTEPSEGSAPGTSESATPESGPGTSTEPSEGSAPGTSESATPESGPGSEPATSGSETPGTSTEPSEGSAPGTSTEPSEGSAPGTSESATPESGPGTSESATPESGPGSPAGSPTSTEEGTSESATPESGPGSEPATSGSETPGTSESATPESGPGTSTEPSEGSAPGTSTEPSEGSAPGTSTEPSEGSAPGTSTEPSEGSAPGTSTEPSEGSAPGTSTEPSEGSAPGSPAGSPTSTEEGTSTEPSEGSAPGTSESATPESGPGSEPATSGSETPGTSESATPESGPGSEPATSGSETPGTSESATPESGPGTSTEPSEGSAPGTSESATPESGPGSPAGSPTSTEEGSPAGSPTSTEEGSPAGSPTSTEEGTSESATPESGPGTSTEPSEGSAPGAAEPEA

SEQ ID NO: 11 - protein, 1445 aa, synthetic construct
  REGION 1..1445: note = Synthetic
ASHHHHHHSPAGSPTSTEEGTSESATPESGPGTSTEPSEGSAPGTSESATPESGPGSEPATSGSETPGTSESATPESGPGSEPATSGSETPGTSESATPESGPGTSTEPSEGSAPGSPAGSPTSTEEGTSESATPESGPGSEPATSGSETPGTSESATPESGPGSPAGSPTSTEEGSPAGSPTSTEEGTSTEPSEGSAPGTSESATPESGPGTSESATPESGPGTSESATPESGPGSEPATSGSETPGSEPATSGSETPGSPAGSPTSTEEGTSTEPSEGSAPGTSTEPSEGSAPGGSAPVSKRFPVGATSGSETPGTDIQMTQSPSSLSASVGDRVTITCQASQDISNYLNWYQQKPGKAPKLLIYDASNLETGVPSRFSGSGSGTDFTFTISSLQPEDIATYFCQHFDHLPLAFGGGTKVEIKGATPPETGAETESPGETTGGSAESEPPGEGQVQLQESGPGLVKPSETLSLTCTVSGGSVSSGDYYWTWIRQSPGKGLEWIGHIYYSGNTNYNPSLKSRLTISIDTSKTQFSLKLSSVTAADTAIYYCVRDRVTGAFDIWGQGTMVTVSSGGGGSELVVTQEPSLTVSPGGTVTLTCRSSTGAVTTSNYANWVQQKPGQAPRGLIGGTNKRAPGTPARFSGSLLGGKAALTLSGVQPEDEAEYYCALWYSNLWVFGGGTKLTVLGATPPETGAETESPGETTGGSAESEPPGEGEVQLLESGGGLVQPGGSLKLSCAASGFTFNTYAMNWVRQAPGKGLEWVARIRSKYNNYATYYADSVKDRFTISRDDSKNTAYLQMNNLKTEDTAVYYCVRHGNFGNSYVSWFAYWGQGTLVTVSSGTAEAASASGVSKRFPVGPGSPAGSPTSTEEGTSESATPESGPGTSTEPSEGSAPGSPAGSPTSTEEGTSTEPSEGSAPGTSTEPSEGSAPGTSESATPESGPGSEPATSGSETPGSEPATSGSETPGSPAGSPTSTEEGTSESATPESGPGTSTEPSEGSAPGTSTEPSEGSAPGSPAGSPTSTEEGTSTEPSEGSAPGTSTEPSEGSAPGTSESATPESGPGTSTEPSEGSAPGTSESATPESGPGSEPATSGSETPGTSTEPSEGSAPGTSTEPSEGSAPGTSESATPESGPGTSESATPESGPGSPAGSPTSTEEGTSESATPESGPGSEPATSGSETPGTSESATPESGPGTSTEPSEGSAPGTSTEPSEGSAPGTSTEPSEGSAPGTSTEPSEGSAPGTSTEPSEGSAPGTSTEPSEGSAPGSPAGSPTSTEEGTSTEPSEGSAPGTSESATPESGPGSEPATSGSETPGTSESATPESGPGSEPATSGSETPGTSESATPESGPGTSTEPSEGSAPGTSESATPESGPGSPAGSPTSTEEGSPAGSPTSTEEGSPAGSPTSTEEGTSESATPESGPGTSTEPSEGSAPGAAEPEA

SEQ ID NO: 12 - protein, 1446 aa, synthetic construct
  REGION 1..1446: note = Synthetic
ASSPAGSPTSTESGTSESATPESGPGTETEPSEGSAPGTSESATPESGPGSEPATSGSETPGTSESATPESGPGSTPAESGSETPGTSESATPESGPGTSTEPSEGSAPGSPAGSPTSTEEGTSESATPESGPGESPATSGSTPEGTSESATPESGPGSPAGSPTSTEEGSPAGSPTSTEEGTSTEPSEGSAPGTSESATPESGPGTSESATPESGPGTSESATPESGPGSEPATSGSETPGSEPATSGSETPGSPAGSPTSTEEGTSTEPSEGSAPGTSTEPSEGSAPGGSAPEAGRSANHTPAGLTGPATSGSETPGTEIVLTQSPATLSLSPGERATLSCKASQDVSIGVAWYQQKPGQAPRLLIYSASYRYSGVPARFSGSGSGTDFTLTISSLEPEDFAVYYCQQYYIYPYTFGQGTKVEIKGATPPETGAETESPGETTGGSAESEPPGEGQVQLVQSGVEVKKPGASVKVSCKASGFTFTDYTMDWVRQAPGQGLEWMADVNPNSGGSIYNQRFKGRVTLTTDSSTTTAYMELKSLQFDDTAVYYCARNLGPSFYFDYWGQGTLVTVSSGGGSELVVTQEPSLTVSPGGTVTLTCRSSNGAVTSSNYANWVQQKPGQAPRGLIGGTNKRAPGTPARFSGSSLGGKAALTLSGVQPEDEAVYYCALWYPNLWVFGGGTKLTVLGATPPETGAETESPGETTGGSAESEPPGEGEVQLQESGGGIVQPGGSLKLSCAASGFTFNTYAMNWVRQAPGKGLEWVARIRSKYNNYATYYADSVKDRFTISRDDSKNTVYLQMNNLKTEDTAVYYCVRHENFGNSYVSWFAHWGQGTLVTVSSGTAEAASASGEAGRSANHTPAGLTGPTPESGPGTSESATPESGPGSPAGSPTSTEEGTSESATPESGPGSEPATSGSETPGTSESATPESGPGTSTEPSEGSAPGTSTEPSEGSAPGTSTEPSEGSAPGTSTEPSEGSAPGTSTEPSEGSAPGTSTEPSEGSAPGSPAGSPTSTEEGTSTEPSEGSAPGTSESATPESGPGSEPATSGSETPGTSESATPESGPGSEPATSGSETPGTSESATPESGPGTSTEPSEGSAPGTSESATPESGPGSPAGSPTSTEEGSPAGSPTSTEEGSPAGSPTSTEEGTSESATPESGPGTSTEPSEGSAPGTSESATPESGPGSEPATSGSETPGTSESATPESGPGSEPATSGSETPGTSESATPESGPGTSTEPSEGSAPGSPAGSPTSTEEGTSESATPESGPGSEPATSGSETPGTSESATPESGPGSPAGSPTSTEEGSPAGSPTSTEEGTSTEPSEGSAPGTSESATPESGPGTSESATPESGPGTSESATPESGPGSEPATSGSETPGSESATSGSETPGSPAGSPTSTEEGTSTEPSEGSAPGTSTEPSEGSAPGSEPATSGSETPGTSESA

SEQ ID NO: 13 - protein, 1445 aa, synthetic construct
  REGION 1..1445: note = Synthetic
ASHHHHHHSPAGSPTSTEEGTSESATPESGPGTSTEPSEGSAPGTSESATPESGPGSEPATSGSETPGTSESATPESGPGSEPATSGSETPGTSESATPESGPGTSTEPSEGSAPGSPAGSPTSTEEGTSESATPESGPGSEPATSGSETPGTSESATPESGPGSPAGSPTSTEEGSPAGSPTSTEEGTSTEPSEGSAPGTSESATPESGPGTSESATPESGPGTSESATPESGPGSEPATSGSETPGSEPATSGSETPGSPAGSPTSTEEGTSTEPSEGSAPGTSTEPSEGSAPGGSAPSPEAQAAAATSGSETPGTDIQMTQSPSSLSASVGDRVTITCQASQDISNYLNWYQQKPGKAPKLLIYDASNLETGVPSRFSGSGSGTDFTFTISSLQPEDIATYFCQHFDHLPLAFGGGTKVEIKGATPPETGAETESPGETTGGSAESEPPGEGQVQLQESGPGLVKPSETLSLTCTVSGGSVSSGDYYWTWIRQSPGKGLEWIGHIYYSGNTNYNPSLKSRLTISIDTSKTQFSLKLSSVTAADTAIYYCVRDRVTGAFDIWGQGTMVTVSSGGGGSELVVTQEPSLTVSPGGTVTLTCRSSTGAVTTSNYANWVQQKPGQAPRGLIGGTNKRAPGTPARFSGSLLGGKAALTLSGVQPEDEAEYYCALWYSNLWVFGGGTKLTVLGATPPETGAETESPGETTGGSAESEPPGEGEVQLLESGGGLVQPGGSLKLSCAASGFTFNTYAMNWVRQAPGKGLEWVARIRSKYNNYATYYADSVKDRFTISRDDSKNTAYLQMNNLKTEDTAVYYCVRHGNFGNSYVSWFAYWGQGTLVTVSSGTAEAASASGSPEAQAAAPGSPAGSPTSTEEGTSESATPESGPGTSTEPSEGSAPGSPAGSPTSTEEGTSTEPSEGSAPGTSTEPSEGSAPGTSESATPESGPGSEPATSGSETPGSEPATSGSETPGSPAGSPTSTEEGTSESATPESGPGTSTEPSEGSAPGTSTEPSEGSAPGSPAGSPTSTEEGTSTEPSEGSAPGTSTEPSEGSAPGTSESATPESGPGTSTEPSEGSAPGTSESATPESGPGSEPATSGSETPGTSTEPSEGSAPGTSTEPSEGSAPGTSESATPESGPGTSESATPESGPGSPAGSPTSTEEGTSESATPESGPGSEPATSGSETPGTSESATPESGPGTSTEPSEGSAPGTSTEPSEGSAPGTSTEPSEGSAPGTSTEPSEGSAPGTSTEPSEGSAPGTSTEPSEGSAPGSPAGSPTSTEEGTSTEPSEGSAPGTSESATPESGPGSEPATSGSETPGTSESATPESGPGSEPATSGSETPGTSESATPESGPGTSTEPSEGSAPGTSESATPESGPGSPAGSPTSTEEGSPAGSPTSTEEGSPAGSPTSTEEGTSESATPESGPGTSTEPSEGSAPGAAEPEA

SEQ ID NO: 14 - protein, 1461 aa, synthetic construct
  REGION 1..1461: note = Synthetic
ASHHHHHHSPAGSPTSTEEGTSESATPESGPGTSTEPSEGSAPGTSESATPESGPGSEPATSGSETPGTSESATPESGPGSEPATSGSETPGTSESATPESGPGTSTEPSEGSAPGSPAGSPTSTEEGTSESATPESGPGSEPATSGSETPGTSESATPESGPGSPAGSPTSTEEGSPAGSPTSTEEGTSTEPSEGSAPGTSESATPESGPGTSESATPESGPGTSESATPESGPGSEPATSGSETPGSEPATSGSETPGSPAGSPTSTEEGTSTEPSEGSAPGTSTEPSEGSAPGGSAPEAGRSANHGVRGLTGPATSGSETPGTDIQMTQSPSSLSASVGDRVTITCKASQDVSIGVAWYQQKPGKAPKLLIYSASYRYTGVPSRFSGSGSGTDFTLTISSLQPEDFATYYCQQYYIYPYTFGQGTKVEIKGATPPETGAETESPGETTGGSAESEPPGEGEVQLVESGGGLVQPGGSLRLSCAASGFTFTDYTMDWVRQAPGKGLEWVADVNPNSGGSIYNQRFKGRFTLSVDRSKNTLYLQMNSLRAEDTAVYYCARNLGPSFYFDYWGQGTLVTVSSGGGGSELVVTQEPSLTVSPGGTVTLTCRSSNGAVTSSNYANWVQQKPGQAPRGLIGGTNKRAPGTPARFSGSLLGGKAALTLSGVQPEDEAVYYCALWYPNLWVFGGGTKLTVLGATPPETGAETESPGETTGGSAESEPPGEGEVQLLESGGGIVQPGGSLKLSCAASGFTFNTYAMNWVRQAPGKGLEWVARIRSKYNNYATYYADSVKDRFTISRDDSKNTVYLQMNNLKTEDTAVYYCVRHENFGNSYVSWFAHWGQGTLVTVSSGTAEAASASGEAGRSANHGVRGLTGPPGSPAGSPTSTEEGTSESATPESGPGTSTEPSEGSAPGSPAGSPTSTEEGTSTEPSEGSAPGTSTEPSEGSAPGTSESATPESGPGSEPATSGSETPGSEPATSGSETPGSPAGSPTSTEEGTSESATPESGPGTSTEPSEGSAPGTSTEPSEGSAPGSPAGSPTSTEEGTSTEPSEGSAPGTSTEPSEGSAPGTSESATPESGPGTSTEPSEGSAPGTSESATPESGPGSEPATSGSETPGTSTEPSEGSAPGTSTEPSEGSAPGTSESATPESGPGTSESATPESGPGSPAGSPTSTEEGTSESATPESGPGSEPATSGSETPGTSESATPESGPGTSTEPSEGSAPGTSTEPSEGSAPGTSTEPSEGSAPGTSTEPSEGSAPGTSTEPSEGSAPGTSTEPSEGSAPGSPAGSPTSTEEGTSTEPSEGSAPGTSESATPESGPGSEPATSGSETPGTSESATPESGPGSEPATSGSETPGTSESATPESGPGTSTEPSEGSAPGTSESATPESGPGSPAGSPTSTEEGSPAGSPTSTEEGSPAGSPTSTEEGTSESATPESGPGTSTEPSEGSAPGAAEPEA

SEQ ID NO: 15 - protein, 1445 aa, synthetic construct
  REGION 1..1445: note = Synthetic
ASHHHHHHSPAGSPTSTEEGTSESATPESGPGTSTEPSEGSAPGTSESATPESGPGSEPATSGSETPGTSESATPESGPGSEPATSGSETPGTSESATPESGPGTSTEPSEGSAPGSPAGSPTSTEEGTSESATPESGPGSEPATSGSETPGTSESATPESGPGSPAGSPTSTEEGSPAGSPTSTEEGTSTEPSEGSAPGTSESATPESGPGTSESATPESGPGTSESATPESGPGSEPATSGSETPGSEPATSGSETPGSPAGSPTSTEEGTSTEPSEGSAPGTSTEPSEGSAPGGSAPLTSDLQAQATSGSETPGTDIQMTQSPSSLSASVGDRVTITCKASQDVSIGVAWYQQKPGKAPKLLIYSASYRYTGVPSRFSGSGSGTDFTLTISSLQPEDFATYYCQQYYIYPYTFGQGTKVEIKGATPPETGAETESPGETTGGSAESEPPGEGEVQLVESGGGLVQPGGSLRLSCAASGFTFTDYTMDWVRQAPGKGLEWVADVNPNSGGSIYNQRFKGRFTLSVDRSKNTLYLQMNSLRAEDTAVYYCARNLGPSFYFDYWGQGTLVTVSSGGGGSELVVTQEPSLTVSPGGTVTLTCRSSNGAVTSSNYANWVQQKPGQAPRGLIGGTNKRAPGTPARFSGSLLGGKAALTLSGVQPEDEAVYYCALWYPNLWVFGGGTKLTVLGATPPETGAETESPGETTGGSAESEPPGEGEVQLLESGGGIVQPGGSLKLSCAASGFTFNTYAMNWVRQAPGKGLEWVARIRSKYNNYATYYADSVKDRFTISRDDSKNTVYLQMNNLKTEDTAVYYCVRHENFGNSYVSWFAHWGQGTLVTVSSGTAEAASASGLTSDLQAQPGSPAGSPTSTEEGTSESATPESGPGTSTEPSEGSAPGSPAGSPTSTEEGTSTEPSEGSAPGTSTEPSEGSAPGTSESATPESGPGSEPATSGSETPGSEPATSGSETPGSPAGSPTSTEEGTSESATPESGPGTSTEPSEGSAPGTSTEPSEGSAPGSPAGSPTSTEEGTSTEPSEGSAPGTSTEPSEGSAPGTSESATPESGPGTSTEPSEGSAPGTSESATPESGPGSEPATSGSETPGTSTEPSEGSAPGTSTEPSEGSAPGTSESATPESGPGTSESATPESGPGSPAGSPTSTEEGTSESATPESGPGSEPATSGSETPGTSESATPESGPGTSTEPSEGSAPGTSTEPSEGSAPGTSTEPSEGSAPGTSTEPSEGSAPGTSTEPSEGSAPGTSTEPSEGSAPGSPAGSPTSTEEGTSTEPSEGSAPGTSESATPESGPGSEPATSGSETPGTSESATPESGPGSEPATSGSETPGTSESATPESGPGTSTEPSEGSAPGTSESATPESGPGSPAGSPTSTEEGSPAGSPTSTEEGSPAGSPTSTEEGTSESATPESGPGTSTEPSEGSAPGAAEPEA

SEQ ID NO: 16 - protein, 1445 aa, synthetic construct
  REGION 1..1445: note = Synthetic
ASHHHHHHSPAGSPTSTEEGTSESATPESGPGTSTEPSEGSAPGTSESATPESGPGSEPATSGSETPGTSESATPESGPGSEPATSGSETPGTSESATPESGPGTSTEPSEGSAPGSPAGSPTSTEEGTSESATPESGPGSEPATSGSETPGTSESATPESGPGSPAGSPTSTEEGSPAGSPTSTEEGTSTEPSEGSAPGTSESATPESGPGTSESATPESGPGTSESATPESGPGSEPATSGSETPGSEPATSGSETPGSPAGSPTSTEEGTSTEPSEGSAPGTSTEPSEGSAPGGSAPQPVSLANTATSGSETPGTDIQMTQSPSSLSASVGDRVTITCKASQDVSIGVAWYQQKPGKAPKLLIYSASYRYTGVPSRFSGSGSGTDFTLTISSLQPEDFATYYCQQYYIYPYTFGQGTKVEIKGATPPETGAETESPGETTGGSAESEPPGEGEVQLVESGGGLVQPGGSLRLSCAASGFTFTDYTMDWVRQAPGKGLEWVADVNPNSGGSIYNQRFKGRFTLSVDRSKNTLYLQMNSLRAEDTAVYYCARNLGPSFYFDYWGQGTLVTVSSGGGGSELVVTQEPSLTVSPGGTVTLTCRSSNGAVTSSNYANWVQQKPGQAPRGLIGGTNKRAPGTPARFSGSLLGGKAALTLSGVQPEDEAVYYCALWYPNLWVFGGGTKLTVLGATPPETGAETESPGETTGGSAESEPPGEGEVQLLESGGGIVQPGGSLKLSCAASGFTFNTYAMNWVRQAPGKGLEWVARIRSKYNNYATYYADSVKDRFTISRDDSKNTVYLQMNNLKTEDTAVYYCVRHENFGNSYVSWFAHWGQGTLVTVSSGTAEAASASGQPVSLANTPGSPAGSPTSTEEGTSESATPESGPGTSTEPSEGSAPGSPAGSPTSTEEGTSTEPSEGSAPGTSTEPSEGSAPGTSESATPESGPGSEPATSGSETPGSEPATSGSETPGSPAGSPTSTEEGTSESATPESGPGTSTEPSEGSAPGTSTEPSEGSAPGSPAGSPTSTEEGTSTEPSEGSAPGTSTEPSEGSAPGTSESATPESGPGTSTEPSEGSAPGTSESATPESGPGSEPATSGSETPGTSTEPSEGSAPGTSTEPSEGSAPGTSESATPESGPGTSESATPESGPGSPAGSPTSTEEGTSESATPESGPGSEPATSGSETPGTSESATPESGPGTSTEPSEGSAPGTSTEPSEGSAPGTSTEPSEGSAPGTSTEPSEGSAPGTSTEPSEGSAPGTSTEPSEGSAPGSPAGSPTSTEEGTSTEPSEGSAPGTSESATPESGPGSEPATSGSETPGTSESATPESGPGSEPATSGSETPGTSESATPESGPGTSTEPSEGSAPGTSESATPESGPGSPAGSPTSTEEGSPAGSPTSTEEGSPAGSPTSTEEGTSESATPESGPGTSTEPSEGSAPGAAEPEA

SEQ ID NO: 17 - protein, 1445 aa, synthetic construct
  REGION 1..1445: note = Synthetic
ASHHHHHHSPAGSPTSTEEGTSESATPESGPGTSTEPSEGSAPGTSESATPESGPGSEPATSGSETPGTSESATPESGPGSEPATSGSETPGTSESATPESGPGTSTEPSEGSAPGSPAGSPTSTEEGTSESATPESGPGSEPATSGSETPGTSESATPESGPGSPAGSPTSTEEGSPAGSPTSTEEGTSTEPSEGSAPGTSESATPESGPGTSESATPESGPGTSESATPESGPGSEPATSGSETPGSEPATSGSETPGSPAGSPTSTEEGTSTEPSEGSAPGTSTEPSEGSAPGGSAPGVRGLTGPATSGSETPGTDIQMTQSPSSLSASVGDRVTITCKASQDVSIGVAWYQQKPGKAPKLLIYSASYRYTGVPSRFSGSGSGTDFTLTISSLQPEDFATYYCQQYYIYPYTFGQGTKVEIKGATPPETGAETESPGETTGGSAESEPPGEGEVQLVESGGGLVQPGGSLRLSCAASGFTFTDYTMDWVRQAPGKGLEWVADVNPNSGGSIYNQRFKGRFTLSVDRSKNTLYLQMNSLRAEDTAVYYCARNLGPSFYFDYWGQGTLVTVSSGGGGSELVVTQEPSLTVSPGGTVTLTCRSSNGAVTSSNYANWVQQKPGQAPRGLIGGTNKRAPGTPARFSGSLLGGKAALTLSGVQPEDEAVYYCALWYPNLWVFGGGTKLTVLGATPPETGAETESPGETTGGSAESEPPGEGEVQLLESGGGIVQPGGSLKLSCAASGFTFNTYAMNWVRQAPGKGLEWVARIRSKYNNYATYYADSVKDRFTISRDDSKNTVYLQMNNLKTEDTAVYYCVRHENFGNSYVSWFAHWGQGTLVTVSSGTAEAASASGGVRGLTGPPGSPAGSPTSTEEGTSESATPESGPGTSTEPSEGSAPGSPAGSPTSTEEGTSTEPSEGSAPGTSTEPSEGSAPGTSESATPESGPGSEPATSGSETPGSEPATSGSETPGSPAGSPTSTEEGTSESATPESGPGTSTEPSEGSAPGTSTEPSEGSAPGSPAGSPTSTEEGTSTEPSEGSAPGTSTEPSEGSAPGTSESATPESGPGTSTEPSEGSAPGTSESATPESGPGSEPATSGSETPGTSTEPSEGSAPGTSTEPSEGSAPGTSESATPESGPGTSESATPESGPGSPAGSPTSTEEGTSESATPESGPGSEPATSGSETPGTSESATPESGPGTSTEPSEGSAPGTSTEPSEGSAPGTSTEPSEGSAPGTSTEPSEGSAPGTSTEPSEGSAPGTSTEPSEGSAPGSPAGSPTSTEEGTSTEPSEGSAPGTSESATPESGPGSEPATSGSETPGTSESATPESGPGSEPATSGSETPGTSESATPESGPGTSTEPSEGSAPGTSESATPESGPGSPAGSPTSTEEGSPAGSPTSTEEGSPAGSPTSTEEGTSESATPESGPGTSTEPSEGSAPGAAEPEA

SEQ ID NO: 18 - protein, 2304 aa, synthetic construct
  REGION 1..2304: note = Synthetic
SAGSPGSPAGSPTSTEEGTSESATPESGPGTSTEPSEGSAPGSPAGSPTSTEEGTSTEPSEGSAPGTSTEPSEGSAPGTSESATPESGPGSTPAESGSETPGSEPATSGSETPGSPAGSPTSTEEGTSESATPESGPGTSTEPSEGSAPGTSTEPSEGSAPGSPAGSPTSTEEGTSTEPSEGSAPGTSTEPSEGSAPGTSESATPESGPGTSTEPSEGSAPGTSESATPESGPGSEPATSGSTETPGTSTEPSEGSAPGTSTEPSEGSAPGTSESATPESGPGTSESATPESGPGSPAGSPTSTEEGTSESATPESGPGSEPATSGSETPGTSESATPESGPGTSTEPSEGSAPGTSTEPSEGSAPGTSTEPSEGSAPGTSTEPSEGSAPGTSTEPSEGSAPGTSTEPSEGSAPGSPAGSPTSTEEGTSTEPSEGSAPGTSESATPESGPGSEPATSGSETPGTSESATPESGPGSEPATSGSETPGTSESATPESGPGTSTEPSEGSAPGTSESATPESGPGSPAGSPTSTEEGSPAGSPTSTEEGSPAGSPTSTEEGTSESATPESGPGTSTEPSEGSAPGTSESATPESGPGSEPATSGSETPGTSESATPESGPGSEPATSGSETPGTSESATPESGPGTSTEPSEGSAPGSPAGSPTSTEEGTSESATPESGPGSEPATSGSETPGTSESATPESGPGSPAGSPTSTEEGSPAGSPTSTEEGTSTEPSEGSAPGTSESATPESGPGTSESATPESGPGTSESATPESGPGSEPATSGSETPGSEPATSGSETPGSPAGSPTSTEEGTSTEPSEGSAPGTSTEPSEGSAPGSEPATSGSETPGTSESATPESGPGTSTEPSEGSAPGSPAGSPTSTEEGTSESATPESGPGTSTEPSEGSAPGSPAGSPTSTEEGTSTEPSEGSAPGTSTEPSEGSAPGTSESATPESGPGSEPATSGSETPGSEPATSGSETPGSPAGSPTSTEEGTSESATPESGPGTSTEPSEGSAPGTSTEPSEGSAPGSPAGSPTSTEEGTSTEPSEGSAPGTSTEPSEGSAPGTSESATPESGPGTSTEPSEGSAPGTSESATPESGPGSEPATSGSETPGTSTEPSEGSAPGTSTEPSEGSAPGTSESATPESGPGTESASASGRAANETPPGLTGAATSGSETPGTEIVLTQSPATLSLSPGERATLSCKASQDVSIGVAWYQQKPGQAPRLLIYSASYRYSGVPARFSGSGSGTDFTLTISSLEPEDFAVYYCQQYYIYPYTFGQGTKVEIKGATPPETGAETESPGETTGGSAESEPPGEGQVQLVQSGVEVKKPGASVKVSCKASGFTFTDYTMDWVRQAPGQGLEWMADVNPNSGGSIYNQRFKGRVTLTTDSSTTTAYMELKSLQFDDTAVYYCARNLGPSFYFDYWGQGTLVTVSSGGGSELVVTQEPSLTVSPGGTVTLTCRSSNGAVTSSNYANWVQQKPGQAPRGLIGGTNKRAPGTPARFSGSLLGGKAALTLSGVQPEDEAVYYCALWYPNLWVFGGGTKLTVLGATPPETGAETESPGETTGGSAESEPPGEGEVQLLESGGGIVQPGGSLKLSCAASGFTFNTYAMNWVRQAPGKGLEWVARIRSKYNNYATYYADSVKDRFTISRDDSKNTVYLQMNNLKTEDTAVYYCVRHENFGNSYVSWFAHWGQGTLVTVSSGTAEAASASGASGRAANETPPGLTGAGSETPGSPAGSPTSTEEGTSESATPESGPGTSTEPSEGSAPGTSTEPSEGSAPGSPAGSPTSTEEGTSTEPSEGSAPGTSTEPSEGSAPGTSESATPESGPGTSTEPSEGSAPGTSESATPESGPGSEPATSGSETPGTSTEPSEGSAPGTSTEPSEGSAPGTSESATPESGPGTSESATPESGPGSPAGSPTSTEEGTSESATPESGPGSEPATSGSETPGTSESATPESGPGTSTEPSEGSAPGTSTEPSEGSAPGTSTEPSEGSAPGTSTEPSEGSAPGTSTEPSEGSAPGTSTEPSEGSAPGSPAGSPTSTEEGTSTEPSEGSAPGTSESATPESGPGSEPATSGSETPGTSESATPESGPGSEPATSGSETPGTSESATPESGPGTSTEPSEGSAPGTSESATPESGPGSPAGSPTSTEEGSPAGSPTSTEEGSPAGSPTSTEEGTSESATPESGPGTSTEPSEGSAPGTSESATPESGPGSEPATSGSTETGTSESATPESGPGSEPATSGSETPGTSESATPESGPGTSTEPSEGSAPGSPAGSPTSTEEGTSESATPESGPGSEPATS

SEQ ID NO: 19 - protein, 2030 aa, synthetic construct
  REGION 1..2030: note = Synthetic
ASSPAGSPTSTESGTSESATPESGPGTETEPSEGSAPGTSESATPESGPGSEPATSGSETPGTSESATPESGPGSTPAESGSETPGTSESATPESGPGTSTEPSEGSAPGSPAGSPTSTEEGTSESATPESGPGESPATSGSTPEGTSESATPESGPGSPAGSPTSTEEGSPAGSPTSTEEGTSTEPSEGSAPGTSESATPESGPGTSESATPESGPGTSESATPESGPGSEPATSGSETPGSEPATSGSETPGSPAGSPTSTEEGTSTEPSEGSAPGTSTEPSEGSAPGGSAPTTGRAGEAANATSAGATGPATSGSETPGTDIQMTQSPSSLSASVGDRVTITCRASQDVNTAVAWYQQKPGKAPKLLIYSASFLYSGVPSRFSGSRSGTDFTLTISSLQPEDFATYYCQQHYTTPPTFGQGTKVEIKGATPPETGAETESPGETTGGSAESEPPGEGEVQLVESGGGLVQPGGSLRLSCAASGFNIKDTYIHWVRQAPGKGLEWVARIYPTNGYTRYADSVKGRFTISADTSKNTAYLQMNSLRAEDTAVYYCSRWGGDGFYAMDYWGQGTLVTVSSGGGSELVVTQEPSLTVSPGGTVTLTCRSSNGAVTSSNYANWVQQKPGQAPRGLIGGTNKRAPGTPARFSGSLLGGKAALTLSGVQPEDEAVYYCALWYPNLWVFGGGTKLTVLGATPPETGAETESPGETTGGSAESEPPGEGEVQLLESGGGIVQPGGSLKLSCAASGFTFNTYAMNWVRQAPGKGLEWVARIRSKYNNYATYYADSVKDRFTISRDDSKNTVYLQMNNLKTEDTAVYYCVRHENFGNSYVSWFAHWGQGTLVTVSSGTAEAASASGTTGRAGEAANATSAGATGPSAGSPGSPAGSPTSTEEGTSESATPESGPGTSTEPSEGSAPGSPAGSPTSTEEGTSTEPSEGSAPGTSTEPSEGSAPGTSESATPESGPGSEPATSGSETPGSEPATSGSETPGSPAGSPTSTEEGTSESATPESGPGTSTEPSEGSAPGTSTEPSEGSAPGSPAGSPTSTEEGTSTEPSEGSAPGTSTEPSEGSAPGTSESATPESGPGTSTEPSEGSAPGTSESATPESGPGSEPATSGSETPGTSTEPSEGSAPGTSTEPSEGSAPGTSESATPESGPGTSESATPESGPGSPAGSPTSTEEGTSESATPESGPGSEPATSGSETPGTSESATPESGPGTSTEPSEGSAPGTSTEPSEGSAPGTSTEPSEGSAPGTSTEPSEGSAPGTSTEPSEGSAPGTSTEPSEGSAPGSPAGSPTSTEEGTSTEPSEGSAPGTSESATPESGPGSEPATSGSETPGTSESATPESGPGSEPATSGSETPGTSESATPESGPGTSTEPSEGSAPGTSESATPESGPGSPAGSPTSTEEGSPAGSPTSTEEGSPAGSPTSTEEGTSESATPESGPGTSTEPSEGSAPGTSESATPESGPGSEPATSGSETPGTSESATPESGPGSEPATSGSETPGTSESATPESGPGTSTEPSEGSAPGSPAGSPTSTEEGTSESATPESGPGSEPATSGSETPGTSESATPESGPGSPAGSPTSTEEGSPAGSPTSTEEGTSTEPSEGSAPGTSESATPESGPGTSESATPESGPGTSESATPESGPGSEPATSGSETPGSEPATSGSETPGSPAGSPTSTEEGTSTEPSEGSAPGTSTEPSEGSAPGSEPATSGSETPGTSESATPESGPGTSTEPSEGSAPGSPAGSPTSTEEGTSESATPESGPGTSTEPSEGSAPGSPAGSPTSTEEGTSTEPSEGSAPGTSTEPSEGSAPGTSESATPESGPGSEPATSGSETPGSEPATSGSTETPGSPAGSPTSTEEGTSESATPESGPGTSTEPSEGSAPGTSTEPSEGSAPGSPAGSPTSTEEGTSTEPSEGSAPGTATESPEGSAPGTSESATPESGPGTSTEPSEGSAPGTSAESATPESGPGSEPATSGSETPGTSTEPSEGSAPGTSTEPSEGSAPGTSESATPESGPGTESAS

SEQ ID NO: 20 - protein, 1445 aa, synthetic construct
  REGION 1..1445: note = Synthetic
ASHHHHHHSPAGSPTSTEEGTSESATPESGPGTSTEPSEGSAPGTSESATPESGPGSEPATSGSETPGTSESATPESGPGSEPATSGSETPGTSESATPESGPGTSTEPSEGSAPGSPAGSPTSTEEGTSESATPESGPGSEPATSGSETPGTSESATPESGPGSPAGSPTSTEEGSPAGSPTSTEEGTSTEPSEGSAPGTSESATPESGPGTSESATPESGPGTSESATPESGPGSEPATSGSETPGSEPATSGSETPGSPAGSPTSTEEGTSTEPSEGSAPGTSTEPSEGSAPGGSAPGPGGVAAAATSGSETPGTDIQMTQSPSSLSASVGDRVTITCKASQDVSIGVAWYQQKPGKAPKLLIYSASYRYTGVPSRFSGSGSGTDFTLTISSLQPEDFATYYCQQYYIYPYTFGQGTKVEIKGATPPETGAETESPGETTGGSAESEPPGEGEVQLVESGGGLVQPGGSLRLSCAASGFTFTDYTMDWVRQAPGKGLEWVADVNPNSGGSIYNQRFKGRFTLSVDRSKNTLYLQMNSLRAEDTAVYYCARNLGPSFYFDYWGQGTLVTVSSGGGGSELVVTQEPSLTVSPGGTVTLTCRSSNGAVTSSNYANWVQQKPGQAPRGLIGGTNKRAPGTPARFSGSLLGGKAALTLSGVQPEDEAVYYCALWYPNLWVFGGGTKLTVLGATPPETGAETESPGETTGGSAESEPPGEGEVQLLESGGGIVQPGGSLKLSCAASGFTFNTYAMNWVRQAPGKGLEWVARIRSKYNNYATYYADSVKDRFTISRDDSKNTVYLQMNNLKTEDTAVYYCVRHENFGNSYVSWFAHWGQGTLVTVSSGTAEAASASGGPGGVAAAPGSPAGSPTSTEEGTSESATPESGPGTSTEPSEGSAPGSPAGSPTSTEEGTSTEPSEGSAPGTSTEPSEGSAPGTSESATPESGPGSEPATSGSETPGSEPATSGSETPGSPAGSPTSTEEGTSESATPESGPGTSTEPSEGSAPGTSTEPSEGSAPGSPAGSPTSTEEGTSTEPSEGSAPGTSTEPSEGSAPGTSESATPESGPGTSTEPSEGSAPGTSESATPESGPGSEPATSGSETPGTSTEPSEGSAPGTSTEPSEGSAPGTSESATPESGPGTSESATPESGPGSPAGSPTSTEEGTSESATPESGPGSEPATSGSETPGTSESATPESGPGTSTEPSEGSAPGTSTEPSEGSAPGTSTEPSEGSAPGTSTEPSEGSAPGTSTEPSEGSAPGTSTEPSEGSAPGSPAGSPTSTEEGTSTEPSEGSAPGTSESATPESGPGSEPATSGSETPGTSESATPESGPGSEPATSGSETPGTSESATPESGPGTSTEPSEGSAPGTSESATPESGPGSPAGSPTSTEEGSPAGSPTSTEEGSPAGSPTSTEEGTSESATPESGPGTSTEPSEGSAPGAAEPEA

SEQ ID NO: 21 - protein, 1445 aa, synthetic construct
  REGION 1..1445: note = Synthetic
ASHHHHHHSPAGSPTSTEEGTSESATPESGPGTSTEPSEGSAPGTSESATPESGPGSEPATSGSETPGTSESATPESGPGSEPATSGSETPGTSESATPESGPGTSTEPSEGSAPGSPAGSPTSTEEGTSESATPESGPGSEPATSGSETPGTSESATPESGPGSPAGSPTSTEEGSPAGSPTSTEEGTSTEPSEGSAPGTSESATPESGPGTSESATPESGPGTSESATPESGPGSEPATSGSETPGSEPATSGSETPGSPAGSPTSTEEGTSTEPSEGSAPGTSTEPSEGSAPGGSAPVSKRFPVGATSGSETPGTDIQMTQSPSSLSASVGDRVTITCKASQDVSIGVAWYQQKPGKAPKLLIYSASYRYTGVPSRFSGSGSGTDFTLTISSLQPEDFATYYCQQYYIYPYTFGQGTKVEIKGATPPETGAETESPGETTGGSAESEPPGEGEVQLVESGGGLVQPGGSLRLSCAASGFTFTDYTMDWVRQAPGKGLEWVADVNPNSGGSIYNQRFKGRFTLSVDRSKNTLYLQMNSLRAEDTAVYYCARNLGPSFYFDYWGQGTLVTVSSGGGGSELVVTQEPSLTVSPGGTVTLTCRSSNGAVTSSNYANWVQQKPGQAPRGLIGGTNKRAPGTPARFSGSLLGGKAALTLSGVQPEDEAVYYCALWYPNLWVFGGGTKLTVLGATPPETGAETESPGETTGGSAESEPPGEGEVQLLESGGGIVQPGGSLKLSCAASGFTFNTYAMNWVRQAPGKGLEWVARIRSKYNNYATYYADSVKDRFTISRDDSKNTVYLQMNNLKTEDTAVYYCVRHENFGNSYVSWFAHWGQGTLVTVSSGTAEAASASGVSKRFPVGPGSPAGSPTSTEEGTSESATPESGPGTSTEPSEGSAPGSPAGSPTSTEEGTSTEPSEGSAPGTSTEPSEGSAPGTSESATPESGPGSEPATSGSETPGSEPATSGSETPGSPAGSPTSTEEGTSESATPESGPGTSTEPSEGSAPGTSTEPSEGSAPGSPAGSPTSTEEGTSTEPSEGSAPGTSTEPSEGSAPGTSESATPESGPGTSTEPSEGSAPGTSESATPESGPGSEPATSGSETPGTSTEPSEGSAPGTSTEPSEGSAPGTSESATPESGPGTSESATPESGPGSPAGSPTSTEEGTSESATPESGPGSEPATSGSETPGTSESATPESGPGTSTEPSEGSAPGTSTEPSEGSAPGTSTEPSEGSAPGTSTEPSEGSAPGTSTEPSEGSAPGTSTEPSEGSAPGSPAGSPTSTEEGTSTEPSEGSAPGTSESATPESGPGSEPATSGSETPGTSESATPESGPGSEPATSGSETPGTSESATPESGPGTSTEPSEGSAPGTSESATPESGPGSPAGSPTSTEEGSPAGSPTSTEEGSPAGSPTSTEEGTSESATPESGPGTSTEPSEGSAPGAAEPEA

SEQ ID NO: 22 - protein, 1445 aa, synthetic construct
  REGION 1..1445: note = Synthetic
ASHHHHHHSPAGSPTSTEEGTSESATPESGPGTSTEPSEGSAPGTSESATPESGPGSEPATSGSETPGTSESATPESGPGSEPATSGSETPGTSESATPESGPGTSTEPSEGSAPGSPAGSPTSTEEGTSESATPESGPGSEPATSGSETPGTSESATPESGPGSPAGSPTSTEEGSPAGSPTSTEEGTSTEPSEGSAPGTSESATPESGPGTSESATPESGPGTSESATPESGPGSEPATSGSETPGSEPATSGSETPGSPAGSPTSTEEGTSTEPSEGSAPGTSTEPSEGSAPGGSAPGPGGVAAAATSGSETPGTDIQMTQSPSSLSASVGDRVTITCQASQDISNYLNWYQQKPGKAPKLLIYDASNLETGVPSRFSGSGSGTDFTFTISSLQPEDIATYFCQHFDHLPLAFGGGTKVEIKGATPPETGAETESPGETTGGSAESEPPGEGQVQLQESGPGLVKPSETLSLTCTVSGGSVSSGDYYWTWIRQSPGKGLEWIGHIYYSGNTNYNPSLKSRLTISIDTSKTQFSLKLSSVTAADTAIYYCVRDRVTGAFDIWGQGTMVTVSSGGGGSELVVTQEPSLTVSPGGTVTLTCRSSTGAVTTSNYANWVQQKPGQAPRGLIGGTNKRAPGTPARFSGSLLGGKAALTLSGVQPEDEAEYYCALWYSNLWVFGGGTKLTVLGATPPETGAETESPGETTGGSAESEPPGEGEVQLLESGGGLVQPGGSLKLSCAASGFTFNTYAMNWVRQAPGKGLEWVARIRSKYNNYATYYADSVKDRFTISRDDSKNTAYLQMNNLKTEDTAVYYCVRHGNFGNSYVSWFAYWGQGTLVTVSSGTAEAASASGGPGGVAAAPGSPAGSPTSTEEGTSESATPESGPGTSTEPSEGSAPGSPAGSPTSTEEGTSTEPSEGSAPGTSTEPSEGSAPGTSESATPESGPGSEPATSGSETPGSEPATSGSETPGSPAGSPTSTEEGTSESATPESGPGTSTEPSEGSAPGTSTEPSEGSAPGSPAGSPTSTEEGTSTEPSEGSAPGTSTEPSEGSAPGTSESATPESGPGTSTEPSEGSAPGTSESATPESGPGSEPATSGSETPGTSTEPSEGSAPGTSTEPSEGSAPGTSESATPESGPGTSESATPESGPGSPAGSPTSTEEGTSESATPESGPGSEPATSGSETPGTSESATPESGPGTSTEPSEGSAPGTSTEPSEGSAPGTSTEPSEGSAPGTSTEPSEGSAPGTSTEPSEGSAPGTSTEPSEGSAPGSPAGSPTSTEEGTSTEPSEGSAPGTSESATPESGPGSEPATSGSETPGTSESATPESGPGSEPATSGSETPGTSESATPESGPGTSTEPSEGSAPGTSESATPESGPGSPAGSPTSTEEGSPAGSPTSTEEGSPAGSPTSTEEGTSESATPESGPGTSTEPSEGSAPGAAEPEA

SEQ ID NO: 23 - protein, 1449 aa, synthetic construct
  REGION 1..1449: note = Synthetic
ASSPAGSPTSTESGTSESATPESGPGTSTEPSEGSAPGTSESATPESGPGSEPATSGSETPGTSESATPESGPGSTPAESGSETPGTSESATPESGPGTSTEPSEGSAPGSPAGSPTSTEEGTSESATPESGPGSEPATSGSETPGTSESATPESGPGSPAGSPTSTEEGSPAGSPTSTEEGTSTEPSEGSAPGTSESATPESGPGTSESATPESGPGTSESATPESGPGSEPATSGSETPGSEPATSGSETPGSPAGSPTSTEEGTSTEPSEGSAPGTSTEPSEGSAPGGSAPASGRSTNAGPPGLTGPATSGSETPGTDIQMTQSPSSLSASVGDRVTITCRASQDVNTAVAWYQQKPGKAPKLLIYSASFLYSGVPSRFSGSRSGTDFTLTISSLQPEDFATYYCQQHYTTPPTFGQGTKVEIKGATPPETGAETESPGETTGGSAESEPPGEGEVQLVESGGGLVQPGGSLRLSCAASGFNIKDTYIHWVRQAPGKGLEWVARIYPTNGYTRYADSVKGRFTISADTSKNTAYLQMNSLRAEDTAVYYCSRWGGDGFYAMDYWGQGTLVTVSSGGGSELVVTQEPSLTVSPGGTVTLTCRSSTGAVTTSNYANWVQQKPGQAPRGLIGGTNKRAPGTPARFSGSLLGGKAALTLSGVQPEDEAEYYCALWYSNLWVFGGGTKLTVLGATPPETGAETESPGETTGGSAESEPPGEGEVQLLESGGGLVQPGGSLKLSCAASGFTFNTYAMNWVRQAPGKGLEWVARIRSKYNNYATYYADSVKDRFTISRDDSKNTAYLQMNNLKTEDTAVYYCVRHGNFGNSYVSWFAYWGQGTLVTVSSGTAEAASASGASGRSTNAGPPGLTGPPGSPAGSPTSTEEGTSESATPESGPGSEPATSGSETPGTSESATPESGPGTSTEPSEGSAPGTSTEPSEGSAPGTSTEPSEGSAPGTSTEPSEGSAPGTSTEPSEGSAPGTSTEPSEGSAPGSPAGSPTSTEEGTSTEPSEGSAPGTSESATPESGPGSEPATSGSETPGTSESATPESGPGSEPATSGSETPGTSESATPESGPGTSTEPSEGSAPGTSESATPESGPGSPAGSPTSTEEGSPAGSPTSTEEGSPAGSPTSTEEGTSESATPESGPGTSTEPSEGSAPGTSESATPESGPGSEPATSGSETPGTSESATPESGPGSEPATSGSETPGTSESATPESGPGTSTEPSEGSAPGSPAGSPTSTEEGTSESATPESGPGSEPATSGSETPGTSESATPESGPGSPAGSPTSTEEGSPAGSPTSTEEGTSTEPSEGSAPGTSESATPESGPGTSESATPESGPGTSESATPESGPGSEPATSGSETPGSEPATSGSETPGSPAGSPTSTEEGTSTEPSEGSAPGTESTPSEGSAPGSEPATSGSETPGTSESATPESGPGTSTEPSEGSAPG

SEQ ID NO: 24 - protein, 1445 aa, synthetic construct
  REGION 1..1445: note = Synthetic
ASHHHHHHSPAGSPTSTEEGTSESATPESGPGTSTEPSEGSAPGTSESATPESGPGSEPATSGSETPGTSESATPESGPGSEPATSGSETPGTSESATPESGPGTSTEPSEGSAPGSPAGSPTSTEEGTSESATPESGPGSEPATSGSETPGTSESATPESGPGSPAGSPTSTEEGSPAGSPTSTEEGTSTEPSEGSAPGTSESATPESGPGTSESATPESGPGTSESATPESGPGSEPATSGSETPGSEPATSGSETPGSPAGSPTSTEEGTSTEPSEGSAPGTSTEPSEGSAPGGSAPQPAHLTFPATSGSETPGTDIQMTQSPSSLSASVGDRVTITCKASQDVSIGVAWYQQKPGKAPKLLIYSASYRYTGVPSRFSGSGSGTDFTLTISSLQPEDFATYYCQQYYIYPYTFGQGTKVEIKGATPPETGAETESPGETTGGSAESEPPGEGEVQLVESGGGLVQPGGSLRLSCAASGFTFTDYTMDWVRQAPGKGLEWVADVNPNSGGSIYNQRFKGRFTLSVDRSKNTLYLQMNSLRAEDTAVYYCARNLGPSFYFDYWGQGTLVTVSSGGGGSELVVTQEPSLTVSPGGTVTLTCRSSNGAVTSSNYANWVQQKPGQAPRGLIGGTNKRAPGTPARFSGSLLGGKAALTLSGVQPEDEAVYYCALWYPNLWVFGGGTKLTVLGATPPETGAETESPGETTGGSAESEPPGEGEVQLLESGGGIVQPGGSLKLSCAASGFTFNTYAMNWVRQAPGKGLEWVARIRSKYNNYATYYADSVKDRFTISRDDSKNTVYLQMNNLKTEDTAVYYCVRHENFGNSYVSWFAHWGQGTLVTVSSGTAEAASASGQPAHLTFPPGSPAGSPTSTEEGTSESATPESGPGTSTEPSEGSAPGSPAGSPTSTEEGTSTEPSEGSAPGTSTEPSEGSAPGTSESATPESGPGSEPATSGSETPGSEPATSGSETPGSPAGSPTSTEEGTSESATPESGPGTSTEPSEGSAPGTSTEPSEGSAPGSPAGSPTSTEEGTSTEPSEGSAPGTSTEPSEGSAPGTSESATPESGPGTSTEPSEGSAPGTSESATPESGPGSEPATSGSETPGTSTEPSEGSAPGTSTEPSEGSAPGTSESATPESGPGTSESATPESGPGSPAGSPTSTEEGTSESATPESGPGSEPATSGSETPGTSESATPESGPGTSTEPSEGSAPGTSTEPSEGSAPGTSTEPSEGSAPGTSTEPSEGSAPGTSTEPSEGSAPGTSTEPSEGSAPGSPAGSPTSTEEGTSTEPSEGSAPGTSESATPESGPGSEPATSGSETPGTSESATPESGPGSEPATSGSETPGTSESATPESGPGTSTEPSEGSAPGTSESATPESGPGSPAGSPTSTEEGSPAGSPTSTEEGSPAGSPTSTEEGTSESATPESGPGTSTEPSEGSAPGAAEPEA

SEQ ID NO: 25 - protein, 2024 aa, synthetic construct
  REGION 1..2024: note = Synthetic
ASSPAGSPTSTESGTSESATPESGPGTSTEPSEGSAPGTSESATPESGPGSEPATSGSETPGTSESATPESGPGSTPAESGSETPGTSESATPESGPGTSTEPSEGSAPGSPAGSPTSTEEGTSESATPESGPGEEPATSGSTPEGTSESATPESGPGSPAGSPTSTEEGSPAGSPTSTEEGTSTEPSEGSAPGTSESATPESGPGTSESATPESGPGTSESATPESGPGSEPATSGSETPGSEPATSGSETPGSPAGSPTSTEEGTSTEPSEGSAPGTSTEPSEGSAPGGSAPEAGRSANHTPAGLTGPATSGSETPGTDIQMTQSPSSLSASVGDRVTITCRASQDVNTAVAWYQQKPGKAPKLLIYSASFLYSGVPSRFSGSRSGTDFTLTISSLQPEDFATYYCQQHYTTPPTFGQGTKVEIKGATPPETGAETESPGETTGGSAESEPPGEGEVQLVESGGGLVQPGGSLRLSCAASGFNIKDTYIHWVRQAPGKGLEWVARIYPTNGYTRYADSVKGRFTISADTSKNTAYLQMNSLRAEDTAVYYCSRWGGDGFYAMDYWGQGTLVTVSSGGGSELVVTQEPSLTVSPGGTVTLTCRSSNGAVTSSNYANWVQQKPGQAPRGLIGGTNKRAPGTPARFSGSLLGGKAALTLSGVQPEDEAVYYCALWYPNLWVFGGGTKLTVLGATPPETGAETESPGETTGGSAESEPPGEGEVQLLESGGGIVQPGGSLKLSCAASGFTFNTYAMNWVRQAPGKGLEWVARIRSKYNNYATYYADSVKDRFTISRDDSKNTVYLQMNNLKTEDTAVYYCVRHENFGNSYVSWFAHWGQGTLVTVSSGTAEAASASGEAGRSANHTPAGLTGPSAGSPGSPAGSPTSTEEGTSESATPESGPGTSTEPSEGSAPGSPAGSPTSTEEGTSTEPSEGSAPGTSTEPSEGSAPGTSESATPESGPGSEPATSGSETPGSEPATSGSETPGSPAGSPTSTEEGTSESATPESGPGTSTEPSEGSAPGTSTEPSEGSAPGSPAGSPTSTEEGTSTEPSEGSAPGTSTEPSEGSAPGTSESATPESGPGTSTEPSEGSAPGTSESATPESGPGSEPATSGSETPGTSTEPSEGSAPGTSTEPSEGSAPGTSESATPESGPGTSESATPESGPGSPAGSPTSTEEGTSESATPESGPGSEPATSGSETPGTSESATPESGPGTSTEPSEGSAPGTSTEPSEGSAPGTSTEPSEGSAPGTSTEPSEGSAPGTSTEPSEGSAPGTSTEPSEGSAPGSPAGSPTSTEEGTSTEPSEGSAPGTSESATPESGPGSEPATSGSETPGTSESATPESGPGSEPATSGSETPGTSESATPESGPGTSTEPSEGSAPGTSESATPESGPGSPAGSPTSTEEGSPAGSPTSTEEGSPAGSPTSTEEGTSESATPESGPGTSTEPSEGSAPGTSESATPESGPGSEPATSGSETPGTSESATPESGPGSEPATSGSETPGTSESATPESGPGTSTEPSEGSAPGSPAGSPTSTEEGTSESATPESGPGSEPATSGSETPGTSESATPESGPGSPAGSPTSTEEGSPAGSPTSTEEGTSTEPSEGSAPGTSESATPESGPGTSESATPESGPGTSESATPESGPGSEPATSGSETPGSEPATSGSETPGSPAGSPTSTEEGTSTEPSEGSAPGTSTEPSEGSAPGSEPATSGSETPGTSESATPESGPGTSTEPSEGSAPGSPAGSPTSTEEGTSESATPESGPGTSTEPSEGSAPGSPAGSPTSTEEGTSTEPSEGSAPGTSTEPSEGSAPGTSESATPESGPGSEPATSGSETPGSEPATSGSTETPGSPAGSPTSTEEGTSESATPESGPGTSTEPSEGSAPGTSTEPSEGSAPGSPAGSPTSTEEGTSTEPSEGSAPGTATESPEGSAPGTSESATPESGPGTSTEPSEGSAPGTSAESATPESGPGSEPATSGSETPGTSTEPSEGSAPGTSTEPSEGSAPGTSESATPESGPGTESAS

SEQ ID NO: 26 - protein, 1461 aa, synthetic construct
  REGION 1..1461: note = Synthetic
ASHHHHHHSPAGSPTSTEEGTSESATPESGPGTSTEPSEGSAPGTSESATPESGPGSEPATSGSETPGTSESATPESGPGSEPATSGSETPGTSESATPESGPGTSTEPSEGSAPGSPAGSPTSTEEGTSESATPESGPGSEPATSGSETPGTSESATPESGPGSPAGSPTSTEEGSPAGSPTSTEEGTSTEPSEGSAPGTSESATPESGPGTSESATPESGPGTSESATPESGPGSEPATSGSETPGSEPATSGSETPGSPAGSPTSTEEGTSTEPSEGSAPGTSTEPSEGSAPGGSAPEAGSPGKDGVRGLTGPATSGSETPGTDIQMTQSPSSLSASVGDRVTITCKASQDVSIGVAWYQQKPGKAPKLLIYSASYRYTGVPSRFSGSGSGTDFTLTISSLQPEDFATYYCQQYYIYPYTFGQGTKVEIKGATPPETGAETESPGETTGGSAESEPPGEGEVQLVESGGGLVQPGGSLRLSCAASGFTFTDYTMDWVRQAPGKGLEWVADVNPNSGGSIYNQRFKGRFTLSVDRSKNTLYLQMNSLRAEDTAVYYCARNLGPSFYFDYWGQGTLVTVSSGGGGSELVVTQEPSLTVSPGGTVTLTCRSSNGAVTSSNYANWVQQKPGQAPRGLIGGTNKRAPGTPARFSGSLLGGKAALTLSGVQPEDEAVYYCALWYPNLWVFGGGTKLTVLGATPPETGAETESPGETTGGSAESEPPGEGEVQLLESGGGIVQPGGSLKLSCAASGFTFNTYAMNWVRQAPGKGLEWVARIRSKYNNYATYYADSVKDRFTISRDDSKNTVYLQMNNLKTEDTAVYYCVRHENFGNSYVSWFAHWGQGTLVTVSSGTAEAASASGEAGSPGKDGVRGLTGPPGSPAGSPTSTEEGTSESATPESGPGTSTEPSEGSAPGSPAGSPTSTEEGTSTEPSEGSAPGTSTEPSEGSAPGTSESATPESGPGSEPATSGSETPGSEPATSGSETPGSPAGSPTSTEEGTSESATPESGPGTSTEPSEGSAPGTSTEPSEGSAPGSPAGSPTSTEEGTSTEPSEGSAPGTSTEPSEGSAPGTSESATPESGPGTSTEPSEGSAPGTSESATPESGPGSEPATSGSETPGTSTEPSEGSAPGTSTEPSEGSAPGTSESATPESGPGTSESATPESGPGSPAGSPTSTEEGTSESATPESGPGSEPATSGSETPGTSESATPESGPGTSTEPSEGSAPGTSTEPSEGSAPGTSTEPSEGSAPGTSTEPSEGSAPGTSTEPSEGSAPGTSTEPSEGSAPGSPAGSPTSTEEGTSTEPSEGSAPGTSESATPESGPGSEPATSGSETPGTSESATPESGPGSEPATSGSETPGTSESATPESGPGTSTEPSEGSAPGTSESATPESGPGSPAGSPTSTEEGSPAGSPTSTEEGSPAGSPTSTEEGTSESATPESGPGTSTEPSEGSAPGAAEPEA

SEQ ID NO: 27 - protein, 1452 aa, synthetic construct
  REGION 1..1452: note = Synthetic
ASSPAGSPTSTESGTSESATPESGPGTSTEPSEGSAPGTSESATPESGPGSEPATSGSETPGTSESATPESGPGSTPAESGSETPGTSESATPESGPGTSTEPSEGSAPGSPAGSPTSTEEGTSESATPESGPGSEPATSGSETPGTSESATPESGPGSPAGSPTSTEEGSPAGSPTSTEEGTSTEPSEGSAPGTSESATPESGPGTSESATPESGPGTSESATPESGPGSEPATSGSETPGSEPATSGSETPGSPAGSPTSTEEGTSTEPSEGSAPGTSTEPSEGSAPGGSAPRTGRTGESANETPAGLGGPATSGSETPGTEIVLTQSPATLSLSPGERATLSCKASQDVSIGVAWYQQKPGQAPRLLIYSASYRYSGVPARFSGSGSGTDFTLTISSLEPEDFAVYYCQQYYIYPYTFGQGTKVEIKGATPPETGAETESPGETTGGSAESEPPGEGQVQLVQSGVEVKKPGASVKVSCKASGFTFTDYTMDWVRQAPGQGLEWMADVNPNSGGSIYNQRFKGRVTLTTDSSTTTAYMELKSLQFDDTAVYYCARNLGPSFYFDYWGQGTLVTVSSGGGSELVVTQEPSLTVSPGGTVTLTCRSSNGAVTSSNYANWVQQKPGQAPRGLIGGTNKRAPGTPARFSGSLLGGKAALTLSGVQPEDEAVYYCALWYPNLWVFGGGTKLTVLGATPPETGAETESPGETTGGSAESEPPGEGEVQLLESGGGIVQPGGSLKLSCAASGFTFNTYAMNWVRQAPGKGLEWVARIRSKYNNYATYYADSVKDRFTISRDDSKNTVYLQMNNLKTEDTAVYYCVRHENFGNSYVSWFAHWGQGTLVTVSSGTAEAASASGRTGRTGESANETPAGLGGPGSETPGSPAGSPTSTEEGTSESATPESGPGTSTEPSEGSAPGTSTEPSEGSAPGSPAGSPTSTEEGTSTEPSEGSAPGTSTEPSEGSAPGTSESATPESGPGTSTEPSEGSAPGTSESATPESGPGSEPATSGSETPGTSTEPSEGSAPGTSTEPSEGSAPGTSESATPESGPGTSESATPESGPGSPAGSPTSTEEGTSESATPESGPGSEPATSGSETPGTSESATPESGPGTSTEPSEGSAPGTSTEPSEGSAPGTSTEPSEGSAPGTSTEPSEGSAPGTSTEPSEGSAPGTSTEPSEGSAPGSPAGSPTSTEEGTSTEPSEGSAPGTSESATPESGPGSEPATSGSETPGTSESATPESGPGSEPATSGSETPGTSESATPESGPGTSTEPSEGSAPGTSESATPESGPGSPAGSPTSTEEGSPAGSPTSTEEGSPAGSPTSTEEGTSESATPESGPGTSTEPSEGSAPGTSESATPESGPGSEPATSGSTETGTSESATPESGPGSEPATSGSETPGTSESATPESGPGTSTEPSEGSAPGSPAGSPTSTEEGTSESATPESGPGSEPATS

SEQ ID NO: 28 - protein, 1445 aa, synthetic construct
  REGION 1..1445: note = Synthetic
ASHHHHHHSPAGSPTSTEEGTSESATPESGPGTSTEPSEGSAPGTSESATPESGPGSEPATSGSETPGTSESATPESGPGSEPATSGSETPGTSESATPESGPGTSTEPSEGSAPGSPAGSPTSTEEGTSESATPESGPGSEPATSGSETPGTSESATPESGPGSPAGSPTSTEEGSPAGSPTSTEEGTSTEPSEGSAPGTSESATPESGPGTSESATPESGPGTSESATPESGPGSEPATSGSETPGSEPATSGSETPGSPAGSPTSTEEGTSTEPSEGSAPGTSTEPSEGSAPGGSAPSPEAQAAAATSGSETPGTDIQMTQSPSSLSASVGDRVTITCKASQDVSIGVAWYQQKPGKAPKLLIYSASYRYTGVPSRFSGSGSGTDFTLTISSLQPEDFATYYCQQYYIYPYTFGQGTKVEIKGATPPETGAETESPGETTGGSAESEPPGEGEVQLVESGGGLVQPGGSLRLSCAASGFTFTDYTMDWVRQAPGKGLEWVADVNPNSGGSIYNQRFKGRFTLSVDRSKNTLYLQMNSLRAEDTAVYYCARNLGPSFYFDYWGQGTLVTVSSGGGGSELVVTQEPSLTVSPGGTVTLTCRSSNGAVTSSNYANWVQQKPGQAPRGLIGGTNKRAPGTPARFSGSLLGGKAALTLSGVQPEDEAVYYCALWYPNLWVFGGGTKLTVLGATPPETGAETESPGETTGGSAESEPPGEGEVQLLESGGGIVQPGGSLKLSCAASGFTFNTYAMNWVRQAPGKGLEWVARIRSKYNNYATYYADSVKDRFTISRDDSKNTVYLQMNNLKTEDTAVYYCVRHENFGNSYVSWFAHWGQGTLVTVSSGTAEAASASGSPEAQAAAPGSPAGSPTSTEEGTSESATPESGPGTSTEPSEGSAPGSPAGSPTSTEEGTSTEPSEGSAPGTSTEPSEGSAPGTSESATPESGPGSEPATSGSETPGSEPATSGSETPGSPAGSPTSTEEGTSESATPESGPGTSTEPSEGSAPGTSTEPSEGSAPGSPAGSPTSTEEGTSTEPSEGSAPGTSTEPSEGSAPGTSESATPESGPGTSTEPSEGSAPGTSESATPESGPGSEPATSGSETPGTSTEPSEGSAPGTSTEPSEGSAPGTSESATPESGPGTSESATPESGPGSPAGSPTSTEEGTSESATPESGPGSEPATSGSETPGTSESATPESGPGTSTEPSEGSAPGTSTEPSEGSAPGTSTEPSEGSAPGTSTEPSEGSAPGTSTEPSEGSAPGTSTEPSEGSAPGSPAGSPTSTEEGTSTEPSEGSAPGTSESATPESGPGSEPATSGSETPGTSESATPESGPGSEPATSGSETPGTSESATPESGPGTSTEPSEGSAPGTSESATPESGPGSPAGSPTSTEEGSPAGSPTSTEEGSPAGSPTSTEEGTSESATPESGPGTSTEPSEGSAPGAAEPEA

SEQ ID NO: 29 - protein, 1445 aa, synthetic construct
  REGION 1..1445: note = Synthetic
ASHHHHHHSPAGSPTSTEEGTSESATPESGPGTSTEPSEGSAPGTSESATPESGPGSEPATSGSETPGTSESATPESGPGSEPATSGSETPGTSESATPESGPGTSTEPSEGSAPGSPAGSPTSTEEGTSESATPESGPGSEPATSGSETPGTSESATPESGPGSPAGSPTSTEEGSPAGSPTSTEEGTSTEPSEGSAPGTSESATPESGPGTSESATPESGPGTSESATPESGPGSEPATSGSETPGSEPATSGSETPGSPAGSPTSTEEGTSTEPSEGSAPGTSTEPSEGSAPGGSAPLTSDLQAQATSGSETPGTDIQMTQSPSSLSASVGDRVTITCQASQDISNYLNWYQQKPGKAPKLLIYDASNLETGVPSRFSGSGSGTDFTFTISSLQPEDIATYFCQHFDHLPLAFGGGTKVEIKGATPPETGAETESPGETTGGSAESEPPGEGQVQLQESGPGLVKPSETLSLTCTVSGGSVSSGDYYWTWIRQSPGKGLEWIGHIYYSGNTNYNPSLKSRLTISIDTSKTQFSLKLSSVTAADTAIYYCVRDRVTGAFDIWGQGTMVTVSSGGGGSELVVTQEPSLTVSPGGTVTLTCRSSTGAVTTSNYANWVQQKPGQAPRGLIGGTNKRAPGTPARFSGSLLGGKAALTLSGVQPEDEAEYYCALWYSNLWVFGGGTKLTVLGATPPETGAETESPGETTGGSAESEPPGEGEVQLLESGGGLVQPGGSLKLSCAASGFTFNTYAMNWVRQAPGKGLEWVARIRSKYNNYATYYADSVKDRFTISRDDSKNTAYLQMNNLKTEDTAVYYCVRHGNFGNSYVSWFAYWGQGTLVTVSSGTAEAASASGLTSDLQAQPGSPAGSPTSTEEGTSESATPESGPGTSTEPSEGSAPGSPAGSPTSTEEGTSTEPSEGSAPGTSTEPSEGSAPGTSESATPESGPGSEPATSGSETPGSEPATSGSETPGSPAGSPTSTEEGTSESATPESGPGTSTEPSEGSAPGTSTEPSEGSAPGSPAGSPTSTEEGTSTEPSEGSAPGTSTEPSEGSAPGTSESATPESGPGTSTEPSEGSAPGTSESATPESGPGSEPATSGSETPGTSTEPSEGSAPGTSTEPSEGSAPGTSESATPESGPGTSESATPESGPGSPAGSPTSTEEGTSESATPESGPGSEPATSGSETPGTSESATPESGPGTSTEPSEGSAPGTSTEPSEGSAPGTSTEPSEGSAPGTSTEPSEGSAPGTSTEPSEGSAPGTSTEPSEGSAPGSPAGSPTSTEEGTSTEPSEGSAPGTSESATPESGPGSEPATSGSETPGTSESATPESGPGSEPATSGSETPGTSESATPESGPGTSTEPSEGSAPGTSESATPESGPGSPAGSPTSTEEGSPAGSPTSTEEGSPAGSPTSTEEGTSESATPESGPGTSTEPSEGSAPGAAEPEA

SEQ ID NO: 30 - protein, 1445 aa, synthetic construct
  REGION 1..1445: note = Synthetic
ASHHHHHHSPAGSPTSTEEGTSESATPESGPGTSTEPSEGSAPGTSESATPESGPGSEPATSGSETPGTSESATPESGPGSEPATSGSETPGTSESATPESGPGTSTEPSEGSAPGSPAGSPTSTEEGTSESATPESGPGSEPATSGSETPGTSESATPESGPGSPAGSPTSTEEGSPAGSPTSTEEGTSTEPSEGSAPGTSESATPESGPGTSESATPESGPGTSESATPESGPGSEPATSGSETPGSEPATSGSETPGSPAGSPTSTEEGTSTEPSEGSAPGTSTEPSEGSAPGGSAPQPAHLTFPATSGSETPGTDIQMTQSPSSLSASVGDRVTITCQASQDISNYLNWYQQKPGKAPKLLIYDASNLETGVPSRFSGSGSGTDFTFTISSLQPEDIATYFCQHFDHLPLAFGGGTKVEIKGATPPETGAETESPGETTGGSAESEPPGEGQVQLQESGPGLVKPSETLSLTCTVSGGSVSSGDYYWTWIRQSPGKGLEWIGHIYYSGNTNYNPSLKSRLTISIDTSKTQFSLKLSSVTAADTAIYYCVRDRVTGAFDIWGQGTMVTVSSGGGGSELVVTQEPSLTVSPGGTVTLTCRSSTGAVTTSNYANWVQQKPGQAPRGLIGGTNKRAPGTPARFSGSLLGGKAALTLSGVQPEDEAEYYCALWYSNLWVFGGGTKLTVLGATPPETGAETESPGETTGGSAESEPPGEGEVQLLESGGGLVQPGGSLKLSCAASGFTFNTYAMNWVRQAPGKGLEWVARIRSKYNNYATYYADSVKDRFTISRDDSKNTAYLQMNNLKTEDTAVYYCVRHGNFGNSYVSWFAYWGQGTLVTVSSGTAEAASASGQPAHLTFPPGSPAGSPTSTEEGTSESATPESGPGTSTEPSEGSAPGSPAGSPTSTEEGTSTEPSEGSAPGTSTEPSEGSAPGTSESATPESGPGSEPATSGSETPGSEPATSGSETPGSPAGSPTSTEEGTSESATPESGPGTSTEPSEGSAPGTSTEPSEGSAPGSPAGSPTSTEEGTSTEPSEGSAPGTSTEPSEGSAPGTSESATPESGPGTSTEPSEGSAPGTSESATPESGPGSEPATSGSETPGTSTEPSEGSAPGTSTEPSEGSAPGTSESATPESGPGTSESATPESGPGSPAGSPTSTEEGTSESATPESGPGSEPATSGSETPGTSESATPESGPGTSTEPSEGSAPGTSTEPSEGSAPGTSTEPSEGSAPGTSTEPSEGSAPGTSTEPSEGSAPGTSTEPSEGSAPGSPAGSPTSTEEGTSTEPSEGSAPGTSESATPESGPGSEPATSGSETPGTSESATPESGPGSEPATSGSETPGTSESATPESGPGTSTEPSEGSAPGTSESATPESGPGSPAGSPTSTEEGSPAGSPTSTEEGSPAGSPTSTEEGTSESATPESGPGTSTEPSEGSAPGAAEPEA

SEQ ID NO: 31 - protein, 1745 aa, synthetic construct
  REGION 1..1745: note = Synthetic
ASSPAGSPTSTESGTSESATPESGPGTSTEPSEGSAPGTSESATPESGPGSEPATSGSETPGTSESATPESGPGSTPAESGSETPGTSESATPESGPGTSTEPSEGSAPGSPAGSPTSTEEGTSESATPESGPGEEPATSGSTPEGTSESATPESGPGSPAGSPTSTEEGSPAGSPTSTEEGTSTEPSEGSAPGTSESATPESGPGTSESATPESGPGTSESATPESGPGSEPATSGSETPGSEPATSGSETPGSPAGSPTSTEEGTSTEPSEGSAPGTSTEPSEGSAPGGSAPGAGRTDNHEPLELGAAATSGSETPGTDIQMTQSPSSLSASVGDRVTITCRASQDVNTAVAWYQQKPGKAPKLLIYSASFLYSGVPSRFSGSRSGTDFTLTISSLQPEDFATYYCQQHYTTPPTFGQGTKVEIKGATPPETGAETESPGETTGGSAESEPPGEGEVQLVESGGGLVQPGGSLRLSCAASGFNIKDTYIHWVRQAPGKGLEWVARIYPTNGYTRYADSVKGRFTISADTSKNTAYLQMNSLRAEDTAVYYCSRWGGDGFYAMDYWGQGTLVTVSSGGGSELVVTQEPSLTVSPGGTVTLTCRSSTGAVTTSNYANWVQQKPGQAPRGLIGGTNKRAPGTPARFSGSSLGGSAALTLSGVQPEDEAEYYCALWYSNLWVFGGGTKLTVLGATPPETGAETESPGETTGGSAESEPPGEGEVQLQESGGGLVQPGGSLKLSCAASGFTFNTYAMNWVRQAPGKGLEWVARIRSKYNNYATYYADSVKDRFTISRDDSKNTAYLQMNNLKTEDTAVYYCVRHGNFGNSYVSWFAYWGQGTLVTVSSGTAEAASASGGAGRTDNHEPLELGAAPGSPAGSPTSTEEGTSESATPESGPGTSTEPSEGSAPGSPAGSPTSTEEGTSTEPSEGSAPGTSTEPSEGSAPGTSESATPESGPGSEPATSGSETPGSEPATSGSETPGSPAGSPTSTEEGTSESATPESGPGTSTEPSEGSAPGTSTEPSEGSAPGSPAGSPTSTEEGTSTEPSEGSAPGTSTEPSEGSAPGTSESATPESGPGTSTEPSEGSAPGTSESATPESGPGSEPATSGSETPGTSTEPSEGSAPGTSTEPSEGSAPGTSESATPESGPGTSESATPESGPGSPAGSPTSTEEGTSESATPESGPGSEPATSGSETPGTSESATPESGPGTSTEPSEGSAPGTSTEPSEGSAPGTSTEPSEGSAPGTSTEPSEGSAPGTSTEPSEGSAPGTSTEPSEGSAPGSPAGSPTSTEEGTSTEPSEGSAPGTSESATPESGPGSEPATSGSETPGTSESATPESGPGSEPATSGSETPGTSESATPESGPGTSTEPSEGSAPGTSESATPESGPGSPAGSPTSTEEGSPAGSPTSTEEGSPAGSPTSTEEGTSESATPESGPGTSTEPSEGSAPGTSESATPESGPGSEPATSGSETPGTSESATPESGPGSEPATSGSETPGTSESATPESGPGTSTEPSEGSAPGSPAGSPTSTEEGTSESATPESGPGSEPATSGSETPGTSESATPESGPGSPAGSPTSTEEGSPAGSPTSTEEGTSTEPSEGSAPGTSESATPESGPGTSESATPESGPGFTABTSESATPESGPGSEPATSGPTESGSEPATSGSETPGSPAGSPTSTEEGTSTEPSEGSAPGTESTPSEGSAPGSEPATSGSETPGTSESATPESGPGTSTEPSEGSAPGEPEA

SEQ ID NO: 32 - protein, 1445 aa, synthetic construct
  REGION 1..1445: note = Synthetic
ASHHHHHHSPAGSPTSTEEGTSESATPESGPGTSTEPSEGSAPGTSESATPESGPGSEPATSGSETPGTSESATPESGPGSEPATSGSETPGTSESATPESGPGTSTEPSEGSAPGSPAGSPTSTEEGTSESATPESGPGSEPATSGSETPGTSESATPESGPGSPAGSPTSTEEGSPAGSPTSTEEGTSTEPSEGSAPGTSESATPESGPGTSESATPESGPGTSESATPESGPGSEPATSGSETPGSEPATSGSETPGSPAGSPTSTEEGTSTEPSEGSAPGTSTEPSEGSAPGGSAPQPVSLANTATSGSETPGTDIQMTQSPSSLSASVGDRVTITCQASQDISNYLNWYQQKPGKAPKLLIYDASNLETGVPSRFSGSGSGTDFTFTISSLQPEDIATYFCQHFDHLPLAFGGGTKVEIKGATPPETGAETESPGETTGGSAESEPPGEGQVQLQESGPGLVKPSETLSLTCTVSGGSVSSGDYYWTWIRQSPGKGLEWIGHIYYSGNTNYNPSLKSRLTISIDTSKTQFSLKLSSVTAADTAIYYCVRDRVTGAFDIWGQGTMVTVSSGGGGSELVVTQEPSLTVSPGGTVTLTCRSSTGAVTTSNYANWVQQKPGQAPRGLIGGTNKRAPGTPARFSGSLLGGKAALTLSGVQPEDEAEYYCALWYSNLWVFGGGTKLTVLGATPPETGAETESPGETTGGSAESEPPGEGEVQLLESGGGLVQPGGSLKLSCAASGFTFNTYAMNWVRQAPGKGLEWVARIRSKYNNYATYYADSVKDRFTISRDDSKNTAYLQMNNLKTEDTAVYYCVRHGNFGNSYVSWFAYWGQGTLVTVSSGTAEAASASGQPVSLANTPGSPAGSPTSTEEGTSESATPESGPGTSTEPSEGSAPGSPAGSPTSTEEGTSTEPSEGSAPGTSTEPSEGSAPGTSESATPESGPGSEPATSGSETPGSEPATSGSETPGSPAGSPTSTEEGTSESATPESGPGTSTEPSEGSAPGTSTEPSEGSAPGSPAGSPTSTEEGTSTEPSEGSAPGTSTEPSEGSAPGTSESATPESGPGTSTEPSEGSAPGTSESATPESGPGSEPATSGSETPGTSTEPSEGSAPGTSTEPSEGSAPGTSESATPESGPGTSESATPESGPGSPAGSPTSTEEGTSESATPESGPGSEPATSGSETPGTSESATPESGPGTSTEPSEGSAPGTSTEPSEGSAPGTSTEPSEGSAPGTSTEPSEGSAPGTSTEPSEGSAPGTSTEPSEGSAPGSPAGSPTSTEEGTSTEPSEGSAPGTSESATPESGPGSEPATSGSETPGTSESATPESGPGSEPATSGSETPGTSESATPESGPGTSTEPSEGSAPGTSESATPESGPGSPAGSPTSTEEGSPAGSPTSTEEGSPAGSPTSTEEGTSESATPESGPGTSTEPSEGSAPGAAEPEA

SEQ ID NO: 33 - protein, 1445 aa, synthetic construct
  REGION 1..1445: note = Synthetic
ASHHHHHHSPAGSPTSTEEGTSESATPESGPGTSTEPSEGSAPGTSESATPESGPGSEPATSGSETPGTSESATPESGPGSEPATSGSETPGTSESATPESGPGTSTEPSEGSAPGSPAGSPTSTEEGTSESATPESGPGSEPATSGSETPGTSESATPESGPGSPAGSPTSTEEGSPAGSPTSTEEGTSTEPSEGSAPGTSESATPESGPGTSESATPESGPGTSESATPESGPGSEPATSGSETPGSEPATSGSETPGSPAGSPTSTEEGTSTEPSEGSAPGTSTEPSEGSAPGGSAPGPSGHMGRATSGSETPGTDIQMTQSPSSLSASVGDRVTITCQASQDISNYLNWYQQKPGKAPKLLIYDASNLETGVPSRFSGSGSGTDFTFTISSLQPEDIATYFCQHFDHLPLAFGGGTKVEIKGATPPETGAETESPGETTGGSAESEPPGEGQVQLQESGPGLVKPSETLSLTCTVSGGSVSSGDYYWTWIRQSPGKGLEWIGHIYYSGNTNYNPSLKSRLTISIDTSKTQFSLKLSSVTAADTAIYYCVRDRVTGAFDIWGQGTMVTVSSGGGGSELVVTQEPSLTVSPGGTVTLTCRSSTGAVTTSNYANWVQQKPGQAPRGLIGGTNKRAPGTPARFSGSLLGGKAALTLSGVQPEDEAEYYCALWYSNLWVFGGGTKLTVLGATPPETGAETESPGETTGGSAESEPPGEGEVQLLESGGGLVQPGGSLKLSCAASGFTFNTYAMNWVRQAPGKGLEWVARIRSKYNNYATYYADSVKDRFTISRDDSKNTAYLQMNNLKTEDTAVYYCVRHGNFGNSYVSWFAYWGQGTLVTVSSGTAEAASASGGPSGHMGRPGSPAGSPTSTEEGTSESATPESGPGTSTEPSEGSAPGSPAGSPTSTEEGTSTEPSEGSAPGTSTEPSEGSAPGTSESATPESGPGSEPATSGSETPGSEPATSGSETPGSPAGSPTSTEEGTSESATPESGPGTSTEPSEGSAPGTSTEPSEGSAPGSPAGSPTSTEEGTSTEPSEGSAPGTSTEPSEGSAPGTSESATPESGPGTSTEPSEGSAPGTSESATPESGPGSEPATSGSETPGTSTEPSEGSAPGTSTEPSEGSAPGTSESATPESGPGTSESATPESGPGSPAGSPTSTEEGTSESATPESGPGSEPATSGSETPGTSESATPESGPGTSTEPSEGSAPGTSTEPSEGSAPGTSTEPSEGSAPGTSTEPSEGSAPGTSTEPSEGSAPGTSTEPSEGSAPGSPAGSPTSTEEGTSTEPSEGSAPGTSESATPESGPGSEPATSGSETPGTSESATPESGPGSEPATSGSETPGTSESATPESGPGTSTEPSEGSAPGTSESATPESGPGSPAGSPTSTEEGSPAGSPTSTEEGSPAGSPTSTEEGTSESATPESGPGTSTEPSEGSAPGAAEPEA

SEQ ID NO: 34 - protein, 1445 aa, synthetic construct
  REGION 1..1445: note = Synthetic
ASHHHHHHSPAGSPTSTEEGTSESATPESGPGTSTEPSEGSAPGTSESATPESGPGSEPATSGSETPGTSESATPESGPGSEPATSGSETPGTSESATPESGPGTSTEPSEGSAPGSPAGSPTSTEEGTSESATPESGPGSEPATSGSETPGTSESATPESGPGSPAGSPTSTEEGSPAGSPTSTEEGTSTEPSEGSAPGTSESATPESGPGTSESATPESGPGTSESATPESGPGSEPATSGSETPGSEPATSGSETPGSPAGSPTSTEEGTSTEPSEGSAPGTSTEPSEGSAPGGSAPGVRGLTGPATSGSETPGTDIQMTQSPSSLSASVGDRVTITCQASQDISNYLNWYQQKPGKAPKLLIYDASNLETGVPSRFSGSGSGTDFTFTISSLQPEDIATYFCQHFDHLPLAFGGGTKVEIKGATPPETGAETESPGETTGGSAESEPPGEGQVQLQESGPGLVKPSETLSLTCTVSGGSVSSGDYYWTWIRQSPGKGLEWIGHIYYSGNTNYNPSLKSRLTISIDTSKTQFSLKLSSVTAADTAIYYCVRDRVTGAFDIWGQGTMVTVSSGGGGSELVVTQEPSLTVSPGGTVTLTCRSSTGAVTTSNYANWVQQKPGQAPRGLIGGTNKRAPGTPARFSGSLLGGKAALTLSGVQPEDEAEYYCALWYSNLWVFGGGTKLTVLGATPPETGAETESPGETTGGSAESEPPGEGEVQLLESGGGLVQPGGSLKLSCAASGFTFNTYAMNWVRQAPGKGLEWVARIRSKYNNYATYYADSVKDRFTISRDDSKNTAYLQMNNLKTEDTAVYYCVRHGNFGNSYVSWFAYWGQGTLVTVSSGTAEAASASGGVRGLTGPPGSPAGSPTSTEEGTSESATPESGPGTSTEPSEGSAPGSPAGSPTSTEEGTSTEPSEGSAPGTSTEPSEGSAPGTSESATPESGPGSEPATSGSETPGSEPATSGSETPGSPAGSPTSTEEGTSESATPESGPGTSTEPSEGSAPGTSTEPSEGSAPGSPAGSPTSTEEGTSTEPSEGSAPGTSTEPSEGSAPGTSESATPESGPGTSTEPSEGSAPGTSESATPESGPGSEPATSGSETPGTSTEPSEGSAPGTSTEPSEGSAPGTSESATPESGPGTSESATPESGPGSPAGSPTSTEEGTSESATPESGPGSEPATSGSETPGTSESATPESGPGTSTEPSEGSAPGTSTEPSEGSAPGTSTEPSEGSAPGTSTEPSEGSAPGTSTEPSEGSAPGTSTEPSEGSAPGSPAGSPTSTEEGTSTEPSEGSAPGTSESATPESGPGSEPATSGSETPGTSESATPESGPGSEPATSGSETPGTSESATPESGPGTSTEPSEGSAPGTSESATPESGPGSPAGSPTSTEEGSPAGSPTSTEEGSPAGSPTSTEEGTSESATPESGPGTSTEPSEGSAPGAAEPEA

SEQ ID NO: 35 - protein, 1445 aa, synthetic construct
  REGION 1..1445: note = Synthetic
ASHHHHHHSPAGSPTSTEEGTSESATPESGPGTSTEPSEGSAPGTSESATPESGPGSEPATSGSETPGTSESATPESGPGSEPATSGSETPGTSESATPESGPGTSTEPSEGSAPGSPAGSPTSTEEGTSESATPESGPGSEPATSGSETPGTSESATPESGPGSPAGSPTSTEEGSPAGSPTSTEEGTSTEPSEGSAPGTSESATPESGPGTSESATPESGPGTSESATPESGPGSEPATSGSETPGSEPATSGSETPGSPAGSPTSTEEGTSTEPSEGSAPGTSTEPSEGSAPGGSAPHPVELLARATSGSETPGTDIQMTQSPSSLSASVGDRVTITCKASQDVSIGVAWYQQKPGKAPKLLIYSASYRYTGVPSRFSGSGSGTDFTLTISSLQPEDFATYYCQQYYIYPYTFGQGTKVEIKGATPPETGAETESPGETTGGSAESEPPGEGEVQLVESGGGLVQPGGSLRLSCAASGFTFTDYTMDWVRQAPGKGLEWVADVNPNSGGSIYNQRFKGRFTLSVDRSKNTLYLQMNSLRAEDTAVYYCARNLGPSFYFDYWGQGTLVTVSSGGGGSELVVTQEPSLTVSPGGTVTLTCRSSNGAVTSSNYANWVQQKPGQAPRGLIGGTNKRAPGTPARFSGSLLGGKAALTLSGVQPEDEAVYYCALWYPNLWVFGGGTKLTVLGATPPETGAETESPGETTGGSAESEPPGEGEVQLLESGGGIVQPGGSLKLSCAASGFTFNTYAMNWVRQAPGKGLEWVARIRSKYNNYATYYADSVKDRFTISRDDSKNTVYLQMNNLKTEDTAVYYCVRHENFGNSYVSWFAHWGQGTLVTVSSGTAEAASASGHPVELLARPGSPAGSPTSTEEGTSESATPESGPGTSTEPSEGSAPGSPAGSPTSTEEGTSTEPSEGSAPGTSTEPSEGSAPGTSESATPESGPGSEPATSGSETPGSEPATSGSETPGSPAGSPTSTEEGTSESATPESGPGTSTEPSEGSAPGTSTEPSEGSAPGSPAGSPTSTEEGTSTEPSEGSAPGTSTEPSEGSAPGTSESATPESGPGTSTEPSEGSAPGTSESATPESGPGSEPATSGSETPGTSTEPSEGSAPGTSTEPSEGSAPGTSESATPESGPGTSESATPESGPGSPAGSPTSTEEGTSESATPESGPGSEPATSGSETPGTSESATPESGPGTSTEPSEGSAPGTSTEPSEGSAPGTSTEPSEGSAPGTSTEPSEGSAPGTSTEPSEGSAPGTSTEPSEGSAPGSPAGSPTSTEEGTSTEPSEGSAPGTSESATPESGPGSEPATSGSETPGTSESATPESGPGSEPATSGSETPGTSESATPESGPGTSTEPSEGSAPGTSESATPESGPGSPAGSPTSTEEGSPAGSPTSTEEGSPAGSPTSTEEGTSESATPESGPGTSTEPSEGSAPGAAEPEA

SEQ ID NO: 36 - protein, 10 aa, synthetic construct
  REGION 1..10: note = Synthetic
IGPGGVAAAA

SEQ ID NO: 37 - protein, 8 aa, synthetic construct
  REGION 1..8: note = Synthetic
DPQGDAAQ

SEQ ID NO: 38 - protein, 10 aa, synthetic construct
  REGION 1..10: note = Synthetic
DGVRGLTGPI

SEQ ID NO: 39 - protein, 10 aa, synthetic construct
  REGION 1..10: note = Synthetic
RGPSGHMGRE

SEQ ID NO: 40 - protein, 10 aa, synthetic construct
  REGION 1..10: note = Synthetic
ISPEAQAAAA

SEQ ID NO: 41 - protein, 8 aa, synthetic construct
  REGION 1..8: note = Synthetic
TPLQLFEG

SEQ ID NO: 42 - protein, 10 aa, synthetic construct
  REGION 1..10: note = Synthetic
QGPPGKNGET

SEQ ID NO: 43 - protein, 8 aa, synthetic construct
  REGION 1..8: note = Synthetic
PPLGAPGL

SEQ ID NO: 44 - protein, 8 aa, synthetic construct
  REGION 1..8: note = Synthetic
KPLGDWAA

SEQ ID NO: 45 - protein, 10 aa, synthetic construct
  REGION 1..10: note = Synthetic
DGAAGVKGDR

SEQ ID NO: 46 - protein, 8 aa, synthetic construct
  REGION 1..8: note = Synthetic
LLSALVET

SEQ ID NO: 47 - protein, 8 aa, synthetic construct
  REGION 1..8: note = Synthetic
QPAHLTFP

SEQ ID NO: 48 - protein, 10 aa, synthetic construct
  REGION 1..10: note = Synthetic
DHPVELLARD

SEQ ID NO: 49 - protein, 8 aa, synthetic construct
  REGION 1..8: note = Synthetic
QPSRLQDP

SEQ ID NO: 50 - protein, 10 aa, synthetic construct
  REGION 1..10: note = Synthetic
DGVRGLTGPI

SEQ ID NO: 51 - protein, 8 aa, synthetic construct
  REGION 1..8: note = Synthetic
QPVSLANT

SEQ ID NO: 52 - protein, 10 aa, synthetic construct
  REGION 1..10: note = Synthetic
IGPGGVAAAA

SEQ ID NO: 53 - protein, 8 aa, synthetic construct
  REGION 1..8: note = Synthetic
LTSDLQAQ

SEQ ID NO: 54 - protein, 8 aa, synthetic construct
  REGION 1..8: note = Synthetic
SPLSLPVT

SEQ ID NO: 55 - protein, 10 aa, synthetic construct
  REGION 1..10: note = Synthetic
GDPGEILGHV

SEQ ID NO: 56 - protein, 10 aa, synthetic construct
  REGION 1..10: note = Synthetic
IGPGGVAAAA

SEQ ID NO: 57 - protein, 8 aa, synthetic construct
  REGION 1..8: note = Synthetic
TPLQLFEG

SEQ ID NO: 58 - protein, 10 aa, synthetic construct
  REGION 1..10: note = Synthetic
DHPVELLARD

SEQ ID NO: 59 - protein, 10 aa, synthetic construct
  REGION 1..10: note = Synthetic
DGVRGLTGPI

SEQ ID NO: 60 - protein, 8 aa, synthetic construct
  REGION 1..8: note = Synthetic
LPVTLGQP

SEQ ID NO: 61 - protein, 8 aa, synthetic construct
  REGION 1..8: note = Synthetic
QPAHLTFP

SEQ ID NO: 62 - protein, 8 aa, synthetic construct
  REGION 1..8: note = Synthetic
SPVTLGQP

SEQ ID NO: 63 - protein, 8 aa, synthetic construct
  REGION 1..8: note = Synthetic
GTLSLSPG

SEQ ID NO: 64 - protein, 9 aa, synthetic construct
  REGION 1..9: note = Synthetic
EEAPSLRPA

SEQ ID NO: 65 - protein, 10 aa, synthetic construct
  REGION 1..10: note = Synthetic
DGAAGVKGDR

SEQ ID NO: 66 - protein, 10 aa, synthetic construct
  REGION 1..10: note = Synthetic
DGVRGLTGPI

SEQ ID NO: 67 - protein, 10 aa, synthetic construct
  REGION 1..10: note = Synthetic
IGPGGVAAAA

SEQ ID NO: 68 - protein, 10 aa, synthetic construct
  REGION 1..10: note = Synthetic
QGPPGKNGET

SEQ ID NO: 69 - protein, 10 aa, synthetic construct
  REGION 1..10: note = Synthetic
RGPSGHMGRE

SEQ ID NO: 70 - protein, 10 aa, synthetic construct
  REGION 1..10: note = Synthetic
DGAAGVKGDR

SEQ ID NO: 71 - protein, 10 aa, synthetic construct
  REGION 1..10: note = Synthetic
KGAKGYRGPE

SEQ ID NO: 72 - protein, 8 aa, synthetic construct
  REGION 1..8: note = Synthetic
PPLGAPGL

SEQ ID NO: 73 - protein, 10 aa, synthetic construct
  REGION 1..10: note = Synthetic
IGNRGPRGET

SEQ ID NO: 74 - protein, 8 aa, synthetic construct
  REGION 1..8: note = Synthetic
GPQLRRGW

SEQ ID NO: 75 - protein, 8 aa, synthetic construct
  REGION 1..8: note = Synthetic
SPPGVDAK

SEQ ID NO: 76 - protein, 8 aa, synthetic construct
  REGION 1..8: note = Synthetic
AAGAMFLE

SEQ ID NO: 77 - protein, 8 aa, synthetic construct
  REGION 1..8: note = Synthetic
AAEAISDA

SEQ ID NO: 78 - protein, 8 aa, synthetic construct
  REGION 1..8: note = Synthetic
EAAFFDTA

SEQ ID NO: 79 - protein, 8 aa, synthetic construct
  REGION 1..8: note = Synthetic
KSHALQLN

SEQ ID NO: 80 - protein, 8 aa, synthetic construct
  REGION 1..8: note = Synthetic
SARASEAE

SEQ ID NO: 81 - protein, 8 aa, synthetic construct
  REGION 1..8: note = Synthetic
PAWAKEKH

SEQ ID NO: 82 - protein, 8 aa, synthetic construct
  REGION 1..8: note = Synthetic
AWAAEVIS

SEQ ID NO: 83 - protein, 9 aa, synthetic construct
  REGION 1..9: note = Synthetic
EEAPSLRPA

SEQ ID NO: 84 - protein, 8 aa, synthetic construct
  REGION 1..8: note = Synthetic
SEASYELT

SEQ ID NO: 85 - protein, 8 aa, synthetic construct
  REGION 1..8: note = Synthetic
PFTASPAS

SEQ ID NO: 86 - protein, 8 aa, synthetic construct
  REGION 1..8: note = Synthetic
QPSRLQDP

SEQ ID NO: 87 - protein, 8 aa, synthetic construct
  REGION 1..8: note = Synthetic
LLSALVET

SEQ ID NO: 88 - protein, 8 aa, synthetic construct
  REGION 1..8: note = Synthetic
QPAHLTFP

SEQ ID NO: 89 - protein, 8 aa, synthetic construct
  REGION 1..8: note = Synthetic
TPLQLFEG

SEQ ID NO: 90 - protein, 8 aa, synthetic construct
  REGION 1..8: note = Synthetic
QPVSLANT

SEQ ID NO: 91 - protein, 10 aa, synthetic construct
  REGION 1..10: note = Synthetic
DGVRGLTGPI

SEQ ID NO: 92 - protein, 10 aa, synthetic construct
  REGION 1..10: note = Synthetic
DHPVELLARD

SEQ ID NO: 93 - protein, 8 aa, synthetic construct
  REGION 1..8: note = Synthetic
SPLSLPVT

SEQ ID NO: 94 - protein, 8 aa, synthetic construct
  REGION 1..8: note = Synthetic
LPVTLGQP

SEQ ID NO: 95 - protein, 10 aa, synthetic construct
  REGION 1..10: note = Synthetic
IGPGGVAAAA

SEQ ID NO: 96 - protein, 8 aa, synthetic construct
  REGION 1..8: note = Synthetic
RSGRDPNH

SEQ ID NO: 97 - protein, 8 aa, synthetic construct
  REGION 1..8: note = Synthetic
AAKRGPGG

SEQ ID NO: 98 - protein, 8 aa, synthetic construct
  REGION 1..8: note = Synthetic
RSKRDVGS

SEQ ID NO: 99 - protein, 8 aa, synthetic construct
  REGION 1..8: note = Synthetic
VSKRFPVG

SEQ ID NO: 100 - protein, 8 aa, synthetic construct
  REGION 1..8: note = Synthetic
VSSRSFFS

SEQ ID NO: 101 - protein, 8 aa, synthetic construct
  REGION 1..8: note = Synthetic
PVQRILGG

SEQ ID NO: 102 - protein, 8 aa, synthetic construct
  REGION 1..8: note = Synthetic
SSGPGSTG

SEQ ID NO: 103 - protein, 8 aa, synthetic construct
  REGION 1..8: note = Synthetic
FSARGHRP

SEQ ID NO: 104 - protein, 8 aa, synthetic construct
  REGION 1..8: note = Synthetic
RQIRGLEE

SEQ ID NO: 105 - protein, 8 aa, synthetic construct
  REGION 1..8: note = Synthetic
RMRRGAGG

SEQ ID NO: 106 - protein, 8 aa, synthetic construct
  REGION 1..8: note = Synthetic
RKKNAPPE

SEQ ID NO: 107 - protein, 8 aa, synthetic construct
  REGION 1..8: note = Synthetic
GDRNKPGV

SEQ ID NO: 108 - protein, 8 aa, synthetic construct
  REGION 1..8: note = Synthetic
TGRNGFKS

SEQ ID NO: 109 - protein, 8 aa, synthetic construct
  REGION 1..8: note = Synthetic
GSWNSGSS

SEQ ID NO: 110 - protein, 8 aa, synthetic construct
  REGION 1..8: note = Synthetic
EPYNATLS

SEQ ID NO: 111 - protein, 8 aa, synthetic construct
  REGION 1..8: note = Synthetic
FTANDSGP

SEQ ID NO: 112 - protein, 8 aa, synthetic construct
  REGION 1..8: note = Synthetic
QGVNDNEE

SEQ ID NO: 113 - protein, 8 aa, synthetic construct
  REGION 1..8: note = Synthetic
SPRNPSSA

SEQ ID NO: 114 - protein, 8 aa, synthetic construct
  REGION 1..8: note = Synthetic
QQLNKPEV

SEQ ID NO: 115 - protein, 8 aa, synthetic construct
  REGION 1..8: note = Synthetic
TSLNTVGG

SEQ ID NO: 116 - protein, 8 aa, synthetic construct
  REGION 1..8: note = Synthetic
RMRRGAGG

SEQ ID NO: 117 - protein, 8 aa, synthetic construct
  REGION 1..8: note = Synthetic
RSKRDVGS

SEQ ID NO: 118 - protein, 8 aa, synthetic construct
  REGION 1..8: note = Synthetic
AAKRGPGG

SEQ ID NO: 119 - protein, 8 aa, synthetic construct
  REGION 1..8: note = Synthetic
RVPRQVRL

SEQ ID NO: 120 - protein, 8 aa, synthetic construct
  REGION 1..8: note = Synthetic
PVQRILGG

SEQ ID NO: 121 - protein, 8 aa, synthetic construct
  REGION 1..8: note = Synthetic
RKTRTVVQ

SEQ ID NO: 122 - protein, 8 aa, synthetic construct
  REGION 1..8: note = Synthetic
PGLRAAPG

SEQ ID NO: 123 - protein, 8 aa, synthetic construct
  REGION 1..8: note = Synthetic
RGPRYAEG

SEQ ID NO: 124 - protein, 8 aa, synthetic construct
  REGION 1..8: note = Synthetic
RQVRTIVE

SEQ ID NO: 125 - protein, 8 aa, synthetic construct
  REGION 1..8: note = Synthetic
RQIRGLEE

SEQ ID NO: 126 - protein, 12 aa, synthetic construct
  REGION 1..12: note = Synthetic
GESPGGSSGSES

SEQ ID NO: 127 - protein, 12 aa, synthetic construct
  REGION 1..12: note = Synthetic
GSEGSSGPGESS

SEQ ID NO: 128 - protein, 12 aa, synthetic construct
  REGION 1..12: note = Synthetic
GSSESGSSEGGP

SEQ ID NO: 129 - protein, 12 aa, synthetic construct
  REGION 1..12: note = Synthetic
GSGGEPSESGSS

SEQ ID NO: 130 - protein, 12 aa, synthetic construct
  REGION 1..12: note = Synthetic
GSPAGSPTSTEE

SEQ ID NO: 131 - protein, 12 aa, synthetic construct
  REGION 1..12: note = Synthetic
GSEPATSGSETP

SEQ ID NO: 132 - protein, 12 aa, synthetic construct
  REGION 1..12: note = Synthetic
GTSESATPESGP

SEQ ID NO: 133 - protein, 12 aa, synthetic construct
  REGION 1..12: note = Synthetic
GTSTEPSEGSAP

SEQ ID NO: 134 - protein, 12 aa, synthetic construct
  REGION 1..12: note = Synthetic
GSTSESPSGTAP

SEQ ID NO: 135 - protein, 12 aa, synthetic construct
  REGION 1..12: note = Synthetic
GTSTPESGSASP

SEQ ID NO: 136 - protein, 12 aa, synthetic construct
  REGION 1..12: note = Synthetic
GTSPSGESSTAP

SEQ ID NO: 137 - protein, 12 aa, synthetic construct
  REGION 1..12: note = Synthetic
GSTSSTAESPGP

SEQ ID NO: 138 - protein, 12 aa, synthetic construct
  REGION 1..12: note = Synthetic
GTPGSGTASSSP

SEQ ID NO: 139 - protein, 12 aa, synthetic construct
  REGION 1..12: note = Synthetic
GSSTPSGATGSP

SEQ ID NO: 140 - protein, 12 aa, synthetic construct
  REGION 1..12: note = Synthetic
GSSPSASTGTGP

SEQ ID NO: 141 - protein, 12 aa, synthetic construct
  REGION 1..12: note = Synthetic
GASPGTSSTGSP

SEQ ID NO: 142 - protein, 12 aa, synthetic construct
  REGION 1..12: note = Synthetic
GEPAGSPTSTSE

SEQ ID NO: 143 - protein, 12 aa, synthetic construct
  REGION 1..12: note = Synthetic
GTGEPSSTPASE

SEQ ID NO: 144 - protein, 12 aa, synthetic construct
  REGION 1..12: note = Synthetic
GSGPSTESAPTE

SEQ ID NO: 145 - protein, 12 aa, synthetic construct
  REGION 1..12: note = Synthetic
GSETPSGPSETA

SEQ ID NO: 146 - protein, 12 aa, synthetic construct
  REGION 1..12: note = Synthetic
GPSETSTSEPGA

SEQ ID NO: 147 - protein, 12 aa, synthetic construct
  REGION 1..12: note = Synthetic
GSPSEPTEGTSA

SEQ ID NO: 148 - protein, 12 aa, synthetic construct
  REGION 1..12: note = Synthetic
GSGASEPTSTEP

SEQ ID NO: 149 - protein, 12 aa, synthetic construct
  REGION 1..12: note = Synthetic
GSEPATSGTEPS

SEQ ID NO: 150 - protein, 12 aa, synthetic construct
  REGION 1..12: note = Synthetic
GTSEPSTSEPGA

SEQ ID NO: 151 - protein, 12 aa, synthetic construct
  REGION 1..12: note = Synthetic
GTSTEPSEPGSA

SEQ ID NO: 152 - protein, 12 aa, synthetic construct
  REGION 1..12: note = Synthetic
GSTAGSETSTEA

SEQ ID NO: 153 - protein, 12 aa, synthetic construct
  REGION 1..12: note = Synthetic
GSETATSGSETA

SEQ ID NO: 154 - protein, 12 aa, synthetic construct
  REGION 1..12: note = Synthetic
GTSESATSESGA

SEQ ID NO: 155 - protein, 12 aa, synthetic construct
  REGION 1..12: note = Synthetic
GTSTEASEGSAS

SEQ ID NO: 156 - protein, 144 aa, synthetic construct
  REGION 1..144: note = Synthetic
GSEPATSGSETPGTSESATPESGPGSEPATSGSETPGSPAGSPTSTEEGTSTEPSEGSAPGSEPATSGSETPGSEPATSGSETPGSEPATSGSETPGTSTEPSEGSAPGTSESATPESGPGSEPATSGSETPGTSTEPSEGSAP

SEQ ID NO: 157 - protein, 144 aa, synthetic construct
  REGION 1..144: note = Synthetic
SPAGSPTSTEEGTSESATPESGPGTSTEPSEGSAPGSPAGSPTSTEEGTSTEPSEGSAPGTSTEPSEGSAPGTSESATPESGPGSEPATSGSETPGSEPATSGSETPGSPAGSPTSTEEGTSESATPESGPGTSTEPSEGSAPG

SEQ ID NO: 158 - protein, 144 aa, synthetic construct
  REGION 1..144: note = Synthetic
TSTEPSEGSAPGSPAGSPTSTEEGTSTEPSEGSAPGTSTEPSEGSAPGTSESATPESGPGTSTEPSEGSAPGTSESATPESGPGSEPATSGSETPGTSTEPSEGSAPGTSTEPSEGSAPGTSESATPESGPGTSESATPESGPG

SEQ ID NO: 159 - protein, 144 aa, synthetic construct; identical to SEQ ID NO: 158
  REGION 1..144: note = Synthetic

SEQ ID NO: 160 - protein, 144 aa, synthetic construct
  REGION 1..144: note = Synthetic
SPAGSPTSTEEGTSESATPESGPGSEPATSGSETPGTSESATPESGPGTSTEPSEGSAPGTSTEPSEGSAPGTSTEPSEGSAPGTSTEPSEGSAPGTSTEPSEGSAPGTSTEPSEGSAPGSPAGSPTSTEEGTSTEPSEGSAPG

SEQ ID NO: 161 - protein, 144 aa, synthetic construct; identical to SEQ ID NO: 160
  REGION 1..144: note = Synthetic

SEQ ID NO: 162 - protein, 144 aa, synthetic construct
  REGION 1..144: note = Synthetic
TSESATPESGPGSEPATSGSETPGTSESATPESGPGSEPATSGSETPGTSESATPESGPGTSTEPSEGSAPGTSESATPESGPGSPAGSPTSTEEGSPAGSPTSTEEGSPAGSPTSTEEGTSESATPESGPGTSTEPSEGSAPG

SEQ ID NO: 163 - protein, 144 aa, synthetic construct; identical to SEQ ID NO: 162
  REGION 1..144: note = Synthetic

SEQ ID NO: 164 - protein, 144 aa, synthetic construct
  REGION 1..144: note = Synthetic
TSESATPESGPGSEPATSGSETPGTSESATPESGPGSEPATSGSETPGTSESATPESGPGTSTEPSEGSAPGSPAGSPTSTEEGTSESATPESGPGSEPATSGSETPGTSESATPESGPGSPAGSPTSTEEGSPAGSPTSTEEG

SEQ ID NO: 165 - protein, 144 aa, synthetic construct
  REGION 1..144: note = Synthetic
TSTEPSEGSAPGTSESATPESGPGTSESATPESGPGTSESATPESGPGSEPATSGSETPGSEPATSGSETPGSPAGSPTSTEEGTSTEPSEGSAPGTSTEPSEGSAPGSEPATSGSETPGTSESATPESGPGTSTEPSEGSAPG

SEQ ID NO: 166 - protein, 288 aa, synthetic construct
  REGION 1..288: note = Synthetic
GTSESATPESGPGSEPATSGSETPGTSESATPESGPGSEPATSGSETPGTSESATPESGPGTSTEPSEGSAPGSPAGSPTSTEEGTSESATPESGPGSEPATSGSETPGTSESATPESGPGSPAGSPTSTEEGSPAGSPTSTEEGTSTEPSEGSAPGTSESATPESGPGTSESATPESGPGTSESATPESGPGSEPATSGSETPGSEPATSGSETPGSPAGSPTSTEEGTSTEPSEGSAPGTSTEPSEGSAPGSEPATSGSETPGTSESATPESGPGTSTEPSEGSAP

SEQ ID NO: 167 - protein, 288 aa, synthetic construct
  REGION 1..288: note = Synthetic
GSPAGSPTSTEEGTSESATPESGPGSEPATSGSETPGTSESATPESGPGTSTEPSEGSAPGTSTEPSEGSAPGTSTEPSEGSAPGTSTEPSEGSAPGTSTEPSEGSAPGTSTEPSEGSAPGSPAGSPTSTEEGTSTEPSEGSAPGTSESATPESGPGSEPATSGSETPGTSESATPESGPGSEPATSGSETPGTSESATPESGPGTSTEPSEGSAPGTSESATPESGPGSPAGSPTSTEEGSPAGSPTSTEEGSPAGSPTSTEEGTSESATPESGPGTSTEPSEGSAP

SEQ ID NO: 168 - protein, 576 aa, synthetic construct
  REGION 1..576: note = Synthetic
GSPAGSPTSTEEGTSESATPESGPGTSTEPSEGSAPGSPAGSPTSTEEGTSTEPSEGSAPGTSTEPSEGSAPGTSESATPESGPGSEPATSGSETPGSEPATSGSETPGSPAGSPTSTEEGTSESATPESGPGTSTEPSEGSAPGTSTEPSEGSAPGSPAGSPTSTEEGTSTEPSEGSAPGTSTEPSEGSAPGTSESATPESGPGTSTEPSEGSAPGTSESATPESGPGSEPATSGSETPGTSTEPSEGSAPGTSTEPSEGSAPGTSESATPESGPGTSESATPESGPGSPAGSPTSTEEGTSESATPESGPGSEPATSGSETPGTSESATPESGPGTSTEPSEGSAPGTSTEPSEGSAPGTSTEPSEGSAPGTSTEPSEGSAPGTSTEPSEGSAPGTSTEPSEGSAPGSPAGSPTSTEEGTSTEPSEGSAPGTSESATPESGPGSEPATSGSETPGTSESATPESGPGSEPATSGSETPGTSESATPESGPGTSTEPSEGSAPGTSESATPESGPGSPAGSPTSTEEGSPAGSPTSTEEGSPAGSPTSTEEGTSESATPESGPGTSTEPSEGSAP

SEQ ID NO: 169 - protein, 625 aa, synthetic construct
  REGION 1..625: note = Synthetic
MAEPAGSPTSTEEGTPGSGTASSSPGSSTPSGATGSPGASPGTSSTGSPGSPAGSPTSTEEGTSESATPESGPGTSTEPSEGSAPGSPAGSPTSTEEGTSTEPSEGSAPGTSTEPSEGSAPGTSESATPESGPGSEPATSGSETPGSEPATSGSETPGSPAGSPTSTEEGTSESATPESGPGTSTEPSEGSAPGTSTEPSEGSAPGSPAGSPTSTEEGTSTEPSEGSAPGTSTEPSEGSAPGTSESATPESGPGTSTEPSEGSAPGTSESATPESGPGSEPATSGSETPGTSTEPSEGSAPGTSTEPSEGSAPGTSESATPESGPGTSESATPESGPGSPAGSPTSTEEGTSESATPESGPGSEPATSGSETPGTSESATPESGPGTSTEPSEGSAPGTSTEPSEGSAPGTSTEPSEGSAPGTSTEPSEGSAPGTSTEPSEGSAPGTSTEPSEGSAPGSPAGSPTSTEEGTSTEPSEGSAPGTSESATPESGPGSEPATSGSETPGTSESATPESGPGSEPATSGSETPGTSESATPESGPGTSTEPSEGSAPGTSESATPESGPGSPAGSPTSTEEGSPAGSPTSTEEGSPAGSPTSTEEGTSESATPESGPGTSTEPSEGSAP

SEQ ID NO: 170 - protein, 864 aa, synthetic construct
  REGION 1..864: note = Synthetic
GSPAGSPTSTEEGTSESATPESGPGTSTEPSEGSAPGSPAGSPTSTEEGTSTEPSEGSAPGTSTEPSEGSAPGTSESATPESGPGSEPATSGSETPGSEPATSGSETPGSPAGSPTSTEEGTSESATPESGPGTSTEPSEGSAPGTSTEPSEGSAPGSPAGSPTSTEEGTSTEPSEGSAPGTSTEPSEGSAPGTSESATPESGPGTSTEPSEGSAPGTSESATPESGPGSEPATSGSETPGTSTEPSEGSAPGTSTEPSEGSAPGTSESATPESGPGTSESATPESGPGSPAGSPTSTEEGTSESATPESGPGSEPATSGSETPGTSESATPESGPGTSTEPSEGSAPGTSTEPSEGSAPGTSTEPSEGSAPGTSTEPSEGSAPGTSTEPSEGSAPGTSTEPSEGSAPGSPAGSPTSTEEGTSTEPSEGSAPGTSESATPESGPGSEPATSGSETPGTSESATPESGPGSEPATSGSETPGTSESATPESGPGTSTEPSEGSAPGTSESATPESGPGSPAGSPTSTEEGSPAGSPTSTEEGSPAGSPTSTEEGTSESATPESGPGTSTEPSEGSAPGTSESATPESGPGSEPATSGSETPGTSESATPESGPGSEPATSGSETPGTSESATPESGPGTSTEPSEGSAPGSPAGSPTSTEEGTSESATPESGPGSEPATSGSETPGTSESATPESGPGSPAGSPTSTEEGSPAGSPTSTEEGTSTEPSEGSAPGTSESATPESGPGTSESATPESGPGTSESATPESGPGSEPATSGSETPGSEPATSGSETPGSPAGSPTSTEEGTSTEPSEGSAPGTSTEPSEGSAPGSEPATSGSETPGTSESATPESGPGTSTEPSEGSAP

SEQ ID NO: 171 - protein, 865 aa, synthetic construct
  REGION 1..865: note = Synthetic
GGSPAGSPTSTEEGTSESATPESGPGTSTEPSEGSAPGSPAGSPTSTEEGTSTEPSEGSAPGTSTEPSEGSAPGTSESATPESGPGSEPATSGSETPGSEPATSGSETPGSPAGSPTSTEEGTSESATPESGPGTSTEPSEGSAPGTSTEPSEGSAPGSPAGSPTSTEEGTSTEPSEGSAPGTSTEPSEGSAPGTSESATPESGPGTSTEPSEGSAPGTSESATPESGPGSEPATSGSETPGTSTEPSEGSAPGTSTEPSEGSAPGTSESATPESGPGTSESATPESGPGSPAGSPTSTEEGTSESATPESGPGSEPATSGSETPGTSESATPESGPGTSTEPSEGSAPGTSTEPSEGSAPGTSTEPSEGSAPGTSTEPSEGSAPGTSTEPSEGSAPGTSTEPSEGSAPGSPAGSPTSTEEGTSTEPSEGSAPGTSESATPESGPGSEPATSGSETPGTSESATPESGPGSEPATSGSETPGTSESATPESGPGTSTEPSEGSAPGTSESATPESGPGSPAGSPTSTEEGSPAGSPTSTEEGSPAGSPTSTEEGTSESATPESGPGTSTEPSEGSAPGTSESATPESGPGSEPATSGSETPGTSESATPESGPGSEPATSGSETPGTSESATPESGPGTSTEPSEGSAPGSPAGSPTSTEEGTSESATPESGPGSEPATSGSETPGTSESATPESGPGSPAGSPTSTEEGSPAGSPTSTEEGTSTEPSEGSAPGTSESATPESGPGTSESATPESGPGTSESATPESGPGSEPATSGSETPGSEPATSGSETPGSPAGSPTSTEEGTSTEPSEGSAPGTSTEPSEGSAPGSEPATSGSETPGTSESATPESGPGTSTEPSEGSAP

SEQ ID NO: 172 - protein, 866 aa, synthetic construct
  REGION 1..866: note = Synthetic
PGSPAGSPTSTEEGTSESATPESGPGTSTEPSEGSAPGSPAGSPTSTEEGTSTEPSEGSAPGTSTEPSEGSAPGTSESATPESGPGSEPATSGSETPGSEPATSGSETPGSPAGSPTSTEEGTSESATPESGPGTSTEPSEGSAPGTSTEPSEGSAPGSPAGSPTSTEEGTSTEPSEGSAPGTSTEPSEGSAPGTSESATPESGPGTSTEPSEGSAPGTSESATPESGPGSEPATSGSETPGTSTEPSEGSAPGTSTEPSEGSAPGTSESATPESGPGTSESATPESGPGSPAGSPTSTEEGTSESATPESGPGSEPATSGSETPGTSESATPESGPGTSTEPSEGSAPGTSTEPSEGSAPGTSTEPSEGSAPGTSTEPSEGSAPGTSTEPSEGSAPGTSTEPSEGSAPGSPAGSPTSTEEGTSTEPSEGSAPGTSESATPESGPGSEPATSGSETPGTSESATPESGPGSEPATSGSETPGTSESATPESGPGTSTEPSEGSAPGTSESATPESGPGSPAGSPTSTEEGSPAGSPTSTEEGSPAGSPTSTEEGTSESATPESGPGTSTEPSEGSAPGTSESATPESGPGSEPATSGSETPGTSESATPESGPGSEPATSGSETPGTSESATPESGPGTSTEPSEGSAPGSPAGSPTSTEEGTSESATPESGPGSEPATSGSETPGTSESATPESGPGSPAGSPTSTEEGSPAGSPTSTEEGTSTEPSEGSAPGTSESATPESGPGTSESATPESGPGTSESATPESGPGSEPATSGSETPGSEPATSGSETPGSPAGSPTSTEEGTSTEPSEGSAPGTSTEPSEGSAPGSEPATSGSETPGTSESATPESGPGTSTEPSEGSAPG

SEQ ID NO: 173 - protein, 1152 aa, synthetic construct
  REGION 1..1152: note = Synthetic
GSPAGSPTSTEEGTSESATPESGPGTSTEPSEGSAPGSPAGSPTSTEEGTSTEPSEGSAPGTSTEPSEGSAPGTSESATPESGPGSEPATSGSETPGSEPATSGSETPGSPAGSPTSTEEGTSESATPESGPGTSTEPSEGSAPGTSTEPSEGSAPGSPAGSPTSTEEGTSTEPSEGSAPGTSTEPSEGSAPGTSESATPESGPGTSTEPSEGSAPGTSESATPESGPGSEPATSGSETPGTSTEPSEGSAPGTSTEPSEGSAPGTSESATPESGPGTSESATPESGPGSPAGSPTSTEEGTSESATPESGPGSEPATSGSETPGTSESATPESGPGTSTEPSEGSAPGTSTEPSEGSAPGTSTEPSEGSAPGTSTEPSEGSAPGTSTEPSEGSAPGTSTEPSEGSAPGSPAGSPTSTEEGTSTEPSEGSAPGTSESATPESGPGSEPATSGSETPGTSESATPESGPGSEPATSGSETPGTSESATPESGPGTSTEPSEGSAPGTSESATPESGPGSPAGSPTSTEEGSPAGSPTSTEEGSPAGSPTSTEEGTSESATPESGPGTSTEPSEGSAPGTSESATPESGPGSEPATSGSETPGTSESATPESGPGSEPATSGSETPGTSESATPESGPGTSTEPSEGSAPGSPAGSPTSTEEGTSESATPESGPGSEPATSGSETPGTSESATPESGPGSPAGSPTSTEEGSPAGSPTSTEEGTSTEPSEGSAPGTSESATPESGPGTSESATPESGPGTSESATPESGPGSEPATSGSETPGSEPATSGSETPGSPAGSPTSTEEGTSTEPSEGSAPGTSTEPSEGSAPGSEPATSGSETPGTSESATPESGPGTSTEPSEGSAPGTSESATPESGPGSEPATSGSETPGTSESATPESGPGSEPATSGSETPGTSESATPESGPGTSTEPSEGSAPGSPAGSPTSTEEGTSESATPESGPGSEPATSGSETPGTSESATPESGPGSPAGSPTSTEEGSPAGSPTSTEEGTSTEPSEGSAPGTSESATPESGPGTSESATPESGPGTSESATPESGPGSEPATSGSETPGSEPATSGSETPGSPAGSPTSTEEGTSTEPSEGSAPGTSTEPSEGSAPGSEPATSGSETPGTSESATPESGPGTSTEPSEGSAP

SEQ ID NO: 174 - protein, 144 aa, synthetic construct
  REGION 1..144: note = Synthetic
STEPSEGSAPGSPAGSPTSTEEGTSTEPSEGSAPGTSESATPESGPGSEPATSGSETPGTSESATPESGPGSEPATSGSETPGTSESATPESGPGTSTEPSEGSAPGTSESATPESGPGSPAGSPTSTEEGSPAGSPTSTEEGS

SEQ ID NO: 175 - protein, 144 aa, synthetic construct
  REGION 1..144: note = Synthetic
SEPATSGSETPGTSESATPESGPGSEPATSGSETPGTSESATPESGPGTSTEPSEGSAPGSPAGSPTSTEEGTSESATPESGPGSEPATSGSETPGTSESATPESGPGSPAGSPTSTEEGSPAGSPTSTEEGTSTEPSEGSAPG

SEQ ID NO: 176 - protein, 180 aa, synthetic construct
  REGION 1..180: note = Synthetic
TSTEEGTSESATPESGPGSEPATSGSETPGTSESATPESGPGSPAGSPTSTEEGSPAGSPTSTEEGTSTEPSEGSAPGTSESATPESGPGTSESATPESGPGTSESATPESGPGSEPATSGSETPGSEPATSGSETPGSPAGSPTSTEEGTSTEPSEGSAPGTSTEPSEGSAPGSEPATS

SEQ ID NO: 177 - protein, 216 aa, synthetic construct
  REGION 1..216: note = Synthetic
PESGPGTSTEPSEGSAPGSPAGSPTSTEEGTSESATPESGPGSEPATSGSETPGTSESATPESGPGSPAGSPTSTEEGSPAGSPTSTEEGTSTEPSEGSAPGTSESATPESGPGTSESATPESGPGTSESATPESGPGSEPATSGSETPGSEPATSGSETPGSPAGSPTSTEEGTSTEPSEGSAPGTSTEPSEGSAPGSEPATSGSETPGTSESAT

SEQ ID NO: 178 - protein, 252 aa, synthetic construct
  REGION 1..252: note = Synthetic
ESGPGSEPATSGSETPGTSESATPESGPGTSTEPSEGSAPGSPAGSPTSTEEGTSESATPESGPGSEPATSGSETPGTSESATPESGPGSPAGSPTSTEEGSPAGSPTSTEEGTSTEPSEGSAPGTSESATPESGPGTSESATPESGPGTSESATPESGPGSEPATSGSETPGSEPATSGSETPGSPAGSPTSTEEGTSTEPSEGSAPGTSTEPSEGSAPGSEPATSGSETPGTSESATPESGPGTSTEPSE

SEQ ID NO: 179 - protein, 288 aa, synthetic construct
  REGION 1..288: note = Synthetic
TPESGPGTSTEPSEGSAPGTSESATPESGPGSEPATSGSETPGTSESATPESGPGSEPATSGSETPGTSESATPESGPGTSTEPSEGSAPGSPAGSPTSTEEGTSESATPESGPGSEPATSGSETPGTSESATPESGPGSPAGSPTSTEEGSPAGSPTSTEEGTSTEPSEGSAPGTSESATPESGPGTSESATPESGPGTSESATPESGPGSEPATSGSETPGSEPATSGSETPGSPAGSPTSTEEGTSTEPSEGSAPGTSTEPSEGSAPGSEPATSGSETPGTSESA

SEQ ID NO: 180 - protein, 324 aa, synthetic construct
  REGION 1..324: note = Synthetic
PESGPGSPAGSPTSTEEGSPAGSPTSTEEGSPAGSPTSTEEGTSESATPESGPGTSTEPSEGSAPGTSESATPESGPGSEPATSGSETPGTSESATPESGPGSEPATSGSETPGTSESATPESGPGTSTEPSEGSAPGSPAGSPTSTEEGTSESATPESGPGSEPATSGSETPGTSESATPESGPGSPAGSPTSTEEGSPAGSPTSTEEGTSTEPSEGSAPGTSESATPESGPGTSESATPESGPGTSESATPESGPGSEPATSGSETPGSEPATSGSETPGSPAGSPTSTEEGTSTEPSEGSAPGTSTEPSEGSAPGSEPATS

SEQ ID NO: 181 - protein, 360 aa, synthetic construct
  REGION 1..360: note = Synthetic
PESGPGTSTEPSEGSAPGTSESATPESGPGSPAGSPTSTEEGSPAGSPTSTEEGSPAGSPTSTEEGTSESATPESGPGTSTEPSEGSAPGTSESATPESGPGSEPATSGSETPGTSESATPESGPGSEPATSGSETPGTSESATPESGPGTSTEPSEGSAPGSPAGSPTSTEEGTSESATPESGPGSEPATSGSETPGTSESATPESGPGSPAGSPTSTEEGSPAGSPTSTEEGTSTEPSEGSAPGTSESATPESGPGTSESATPESGPGTSESATPESGPGSEPATSGSETPGSEPATSGSETPGSPAGSPTSTEEGTSTEPSEGSAPGTSTEPSEGSAPGSEPATSGSETPGTSESAT

SEQ ID NO: 182 - protein, 360 aa, synthetic construct
  REGION 1..360: note = Synthetic
PESGPGSEPATSGSETPGTSESATPESGPGTSTEPSEGSAPGTSESATPESGPGSPAGSPTSTEEGSPAGSPTSTEEGSPAGSPTSTEEGTSESATPESGPGTSTEPSEGSAPGTSESATPESGPGSEPATSGSETPGTSESATPESGPGSEPATSGSETPGTSESATPESGPGTSTEPSEGSAPGSPAGSPTSTEEGTSESATPESGPGSEPATSGSETPGTSESATPESGPGSPAGSPTSTEEGSPAGSPTSTEEGTSTEPSEGSAPGTSESATPESGPGTSESATPESGPGTSESATPESGPGSEPATSGSETPGSEPATSGSETPGSPAGSPTSTEEGTSTEPSEGSAPGTSTEPS

SEQ ID NO: 183 - protein, 432 aa, synthetic construct
  REGION 1..432: note = Synthetic
EGSAPGSPAGSPTSTEEGTSTEPSEGSAPGTSESATPESGPGSEPATSGSETPGTSESATPESGPGSEPATSGSETPGTSESATPESGPGTSTEPSEGSAPGTSESATPESGPGSPAGSPTSTEEGSPAGSPTSTEEGSPAGSPTSTEEGTSESATPESGPGTSTEPSEGSAPGTSESATPESGPGSEPATSGSETPGTSESATPESGPGSEPATSGSETPGTSESATPESGPGTSTEPSEGSAPGSPAGSPTSTEEGTSESATPESGPGSEPATSGSETPGTSESATPESGPGSPAGSPTSTEEGSPAGSPTSTEEGTSTEPSEGSAPGTSESATPESGPGTSESATPESGPGTSESATPESGPGSEPATSGSETPGSEPATSGSETPGSPAGSPTSTEEGTSTEPSEGSAPGTSTEPSEGSAPGSEPATS

SEQ ID NO: 184 - protein, 468 aa, synthetic construct
  REGION 1..468: note = Synthetic
EGSAPGTSTEPSEGSAPGTSTEPSEGSAPGSPAGSPTSTEEGTSTEPSEGSAPGTSESATPESGPGSEPATSGSETPGTSESATPESGPGSEPATSGSETPGTSESATPESGPGTSTEPSEGSAPGTSESATPESGPGSPAGSPTSTEEGSPAGSPTSTEEGSPAGSPTSTEEGTSESATPESGPGTSTEPSEGSAPGTSESATPESGPGSEPATSGSETPGTSESATPESGPGSEPATSGSETPGTSESATPESGPGTSTEPSEGSAPGSPAGSPTSTEEGTSESATPESGPGSEPATSGSETPGTSESATPESGPGSPAGSPTSTEEGSPAGSPTSTEEGTSTEPSEGSAPGTSESATPESGPGTSESATPESGPGTSESATPESGPGSEPATSGSETPGSEPATSGSETPGSPAGSPTSTEEGTSTEPSEGSAPGTSTEPSEGSAPGSEPATSGSETPGTSESAT

SEQ ID NO: 185 - protein, 504 aa, synthetic construct
  REGION 1..504: note = Synthetic
EGSAPGTSTEPSEGSAPGTSTEPSEGSAPGTSTEPSEGSAPGTSTEPSEGSAPGSPAGSPTSTEEGTSTEPSEGSAPGTSESATPESGPGSEPATSGSETPGTSESATPESGPGSEPATSGSETPGTSESATPESGPGTSTEPSEGSAPGTSESATPESGPGSPAGSPTSTEEGSPAGSPTSTEEGSPAGSPTSTEEGTSESATPESGPGTSTEPSEGSAPGTSESATPESGPGSEPATSGSETPGTSESATPESGPGSEPATSGSETPGTSESATPESGPGTSTEPSEGSAPGSPAGSPTSTEEGTSESATPESGPGSEPATSGSETPGTSESATPESGPGSPAGSPTSTEEGSPAGSPTSTEEGTSTEPSEGSAPGTSESATPESGPGTSESATPESGPGTSESATPESGPGSEPATSGSETPGSEPATSGSETPGSPAGSPTSTEEGTSTEPSEGSAPGTSTEPSEGSAPGSEPATSGSETPGTSESATPESGPGTSTEPS

SEQ ID NO: 186 - protein, 540 aa, synthetic construct
  REGION 1..540: note = Synthetic
TPESGPGSPAGSPTSTEEGTSESATPESGPGSEPATSGSETPGTSESATPESGPGTSTEPSEGSAPGTSTEPSEGSAPGTSTEPSEGSAPGTSTEPSEGSAPGTSTEPSEGSAPGTSTEPSEGSAPGSPAGSPTSTEEGTSTEPSEGSAPGTSESATPESGPGSEPATSGSETPGTSESATPESGPGSEPATSGSETPGTSESATPESGPGTSTEPSEGSAPGTSESATPESGPGSPAGSPTSTEEGSPAGSPTSTEEGSPAGSPTSTEEGTSESATPESGPGTSTEPSEGSAPGTSESATPESGPGSEPATSGSETPGTSESATPESGPGSEPATSGSETPGTSESATPESGPGTSTEPSEGSAPGSPAGSPTSTEEGTSESATPESGPGSEPATSGSETPGTSESATPESGPGSPAGSPTSTEEGSPAGSPTSTEEGTSTEPSEGSAPGTSESATPESGPGTSESATPESGPGTSESATPESGPGSEPATSGSETPGSEPATSGSETPGSPAGSPTSTEEGTSTEPSEGSAPGTSTEP

SEQ ID NO: 187 - protein, 576 aa, synthetic construct
  REGION 1..576: note = Synthetic
TPESGPGTSESATPESGPGSPAGSPTSTEEGTSESATPESGPGSEPATSGSETPGTSESATPESGPGTSTEPSEGSAPGTSTEPSEGSAPGTSTEPSEGSAPGTSTEPSEGSAPGTSTEPSEGSAPGTSTEPSEGSAPGSPAGSPTSTEEGTSTEPSEGSAPGTSESATPESGPGSEPATSGSETPGTSESATPESGPGSEPATSGSETPGTSESATPESGPGTSTEPSEGSAPGTSESATPESGPGSPAGSPTSTEEGSPAGSPTSTEEGSPAGSPTSTEEGTSESATPESGPGTSTEPSEGSAPGTSESATPESGPGSEPATSGSETPGTSESATPESGPGSEPATSGSETPGTSESATPESGPGTSTEPSEGSAPGSPAGSPTSTEEGTSESATPESGPGSEPATSGSETPGTSESATPESGPGSPAGSPTSTEEGSPAGSPTSTEEGTSTEPSEGSAPGTSESATPESGPGTSESATPESGPGTSESATPESGPGSEPATSGSETPGSEPATSGSETPGSPAGSPTSTEEGTSTEPSEGSAPGTSTEPSEGSAPGSEPATSGSETPGTSESA

SEQ ID NO: 188 - protein, 612 aa, synthetic construct
  REGION 1..612: note = Synthetic
GSETPGTSTEPSEGSAPGTSTEPSEGSAPGTSESATPESGPGTSESATPESGPGSPAGSPTSTEEGTSESATPESGPGSEPATSGSETPGTSESATPESGPGTSTEPSEGSAPGTSTEPSEGSAPGTSTEPSEGSAPGTSTEPSEGSAPGTSTEPSEGSAPGTSTEPSEGSAPGSPAGSPTSTEEGTSTEPSEGSAPGTSESATPESGPGSEPATSGSETPGTSESATPESGPGSEPATSGSETPGTSESATPESGPGTSTEPSEGSAPGTSESATPESGPGSPAGSPTSTEEGSPAGSPTSTEEGSPAGSPTSTEEGTSESATPESGPGTSTEPSEGSAPGTSESATPESGPGSEPATSGSETPGTSESATPESGPGSEPATSGSETPGTSESATPESGPGTSTEPSEGSAPGSPAGSPTSTEEGTSESATPESGPGSEPATSGSETPGTSESATPESGPGSPAGSPTSTEEGSPAGSPTSTEEGTSTEPSEGSAPGTSESATPESGPGTSESATPESGPGTSESATPESGPGSEPATSGSETPGSEPATSGSETPGSPAGSPTSTEEGTSTEPSEGSAPGTSTEPSEGSAPGSEPATSGSETPGTSESAT

SEQ ID NO: 189 - protein, 648 aa, synthetic construct
  REGION 1..648: note = Synthetic
PESGPGTSTEPSEGSAPGTSESATPESGPGSEPATSGSETPGTSTEPSEGSAPGTSTEPSEGSAPGTSESATPESGPGTSESATPESGPGSPAGSPTSTEEGTSESATPESGPGSEPATSGSETPGTSESATPESGPGTSTEPSEGSAPGTSTEPSEGSAPGTSTEPSEGSAPGTSTEPSEGSAPGTSTEPSEGSAPGTSTEPSEGSAPGSPAGSPTSTEEGTSTEPSEGSAPGTSESATPESGPGSEPATSGSETPGTSESATPESGPGSEPATSGSETPGTSESATPESGPGTSTEPSEGSAPGTSESATPESGPGSPAGSPTSTEEGSPAGSPTSTEEGSPAGSPTSTEEGTSESATPESGPGTSTEPSEGSAPGTSESATPESGPGSEPATSGSETPGTSESATPESGPGSEPATSGSETPGTSESATPESGPGTSTEPSEGSAPGSPAGSPTSTEEGTSESATPESGPGSEPATSGSETPGTSESATPESGPGSPAGSPTSTEEGSPAGSPTSTEEGTSTEPSEGSAPGTSESATPESGPGTSESATPESGPGTSESATPESGPGSEPATSGSETPGSEPATSGSETPGSPAGSPTSTEEGTSTEPSEGSAPGTSTEPSEGSAPGSEPATSGSETPGTSESAT

SEQ ID NO: 190 - protein, 684 aa, synthetic construct
  REGION 1..684: note = Synthetic
EGSAPGSPAGSPTSTEEGTSTEPSEGSAPGTSTEPSEGSAPGTSESATPESGPGTSTEPSEGSAPGTSESATPESGPGSEPATSGSETPGTSTEPSEGSAPGTSTEPSEGSAPGTSESATPESGPGTSESATPESGPGSPAGSPTSTEEGTSESATPESGPGSEPATSGSETPGTSESATPESGPGTSTEPSEGSAPGTSTEPSEGSAPGTSTEPSEGSAPGTSTEPSEGSAPGTSTEPSEGSAPGTSTEPSEGSAPGSPAGSPTSTEEGTSTEPSEGSAPGTSESATPESGPGSEPATSGSETPGTSESATPESGPGSEPATSGSETPGTSESATPESGPGTSTEPSEGSAPGTSESATPESGPGSPAGSPTSTEEGSPAGSPTSTEEGSPAGSPTSTEEGTSESATPESGPGTSTEPSEGSAPGTSESATPESGPGSEPATSGSETPGTSESATPESGPGSEPATSGSETPGTSESATPESGPGTSTEPSEGSAPGSPAGSPTSTEEGTSESATPESGPGSEPATSGSETPGTSESATPESGPGSPAGSPTSTEEGSPAGSPTSTEEGTSTEPSEGSAPGTSESATPESGPGTSESATPESGPGTSESATPESGPGSEPATSGSETPGSEPATSGSETPGSPAGSPTSTEEGTSTEPSEGSAPGTSTEPSEGSAPGSEPATS

SEQ ID NO: 191 - protein, 720 aa, synthetic construct
  REGION 1..720: note = Synthetic
TSGSETPGSEPATSGSETPGSPAGSPTSTEEGTSESATPESGPGTSTEPSEGSAPGTSTEPSEGSAPGSPAGSPTSTEEGTSTEPSEGSAPGTSTEPSEGSAPGTSESATPESGPGTSTEPSEGSAPGTSESATPESGPGSEPATSGSETPGTSTEPSEGSAPGTSTEPSEGSAPGTSESATPESGPGTSESATPESGPGSPAGSPTSTEEGTSESATPESGPGSEPATSGSETPGTSESATPESGPGTSTEPSEGSAPGTSTEPSEGSAPGTSTEPSEGSAPGTSTEPSEGSAPGTSTEPSEGSAPGTSTEPSEGSAPGSPAGSPTSTEEGTSTEPSEGSAPGTSESATPESGPGSEPATSGSETPGTSESATPESGPGSEPATSGSETPGTSESATPESGPGTSTEPSEGSAPGTSESATPESGPGSPAGSPTSTEEGSPAGSPTSTEEGSPAGSPTSTEEGTSESATPESGPGTSTEPSEGSAPGTSESATPESGPGSEPATSGSETPGTSESATPESGPGSEPATSGSETPGTSESATPESGPGTSTEPSEGSAPGSPAGSPTSTEEGTSESATPESGPGSEPATSGSETPGTSESATPESGPGSPAGSPTSTEEGSPAGSPTSTEEGTSTEPSEGSAPGTSESATPESGPGTSESATPESGPGTSESATPESGPGSEPATSGSETPGSEPATSGSETPGSPAGSPTSTEEGTSTE

SEQ ID NO: 192 - protein, 756 aa, synthetic construct
  REGION 1..756: note = Synthetic
TSGSETPGSEPATSGSETPGSPAGSPTSTEEGTSESATPESGPGTSTEPSEGSAPGTSTEPSEGSAPGSPAGSPTSTEEGTSTEPSEGSAPGTSTEPSEGSAPGTSESATPESGPGTSTEPSEGSAPGTSESATPESGPGSEPATSGSETPGTSTEPSEGSAPGTSTEPSEGSAPGTSESATPESGPGTSESATPESGPGSPAGSPTSTEEGTSESATPESGPGSEPATSGSETPGTSESATPESGPGTSTEPSEGSAPGTSTEPSEGSAPGTSTEPSEGSAPGTSTEPSEGSAPGTSTEPSEGSAPGTSTEPSEGSAPGSPAGSPTSTEEGTSTEPSEGSAPGTSESATPESGPGSEPATSGSETPGTSESATPESGPGSEPATSGSETPGTSESATPESGPGTSTEPSEGSAPGTSESATPESGPGSPAGSPTSTEEGSPAGSPTSTEEGSPAGSPTSTEEGTSESATPESGPGTSTEPSEGSAPGTSESATPESGPGSEPATSGSETPGTSESATPESGPGSEPATSGSETPGTSESATPESGPGTSTEPSEGSAPGSPAGSPTSTEEGTSESATPESGPGSEPATSGSETPGTSESATPESGPGSPAGSPTSTEEGSPAGSPTSTEEGTSTEPSEGSAPGTSESATPESGPGTSESATPESGPGTSESATPESGPGSEPATSGSETPGSEPATSGSETPGSPAGSPTSTEEGTSTEPSEGSAPGTSTEPSEGSAPGSEPATSGSETPGTSES

SEQ ID NO: 193 - protein, 792 aa, synthetic construct
  REGION 1..792: note = Synthetic
EGSAPGTSESATPESGPGSEPATSGSETPGSEPATSGSETPGSPAGSPTSTEEGTSESATPESGPGTSTEPSEGSAPGTSTEPSEGSAPGSPAGSPTSTEEGTSTEPSEGSAPGTSTEPSEGSAPGTSESATPESGPGTSTEPSEGSAPGTSESATPESGPGSEPATSGSETPGTSTEPSEGSAPGTSTEPSEGSAPGTSESATPESGPGTSESATPESGPGSPAGSPTSTEEGTSESATPESGPGSEPATSGSETPGTSESATPESGPGTSTEPSEGSAPGTSTEPSEGSAPGTSTEPSEGSAPGTSTEPSEGSAPGTSTEPSEGSAPGTSTEPSEGSAPGSPAGSPTSTEEGTSTEPSEGSAPGTSESATPESGPGSEPATSGSETPGTSESATPESGPGSEPATSGSETPGTSESATPESGPGTSTEPSEGSAPGTSESATPESGPGSPAGSPTSTEEGSPAGSPTSTEEGSPAGSPTSTEEGTSESATPESGPGTSTEPSEGSAPGTSESATPESGPGSEPATSGSETPGTSESATPESGPGSEPATSGSETPGTSESATPESGPGTSTEPSEGSAPGSPAGSPTSTEEGTSESATPESGPGSEPATSGSETPGTSESATPESGPGSPAGSPTSTEEGSPAGSPTSTEEGTSTEPSEGSAPGTSESATPESGPGTSESATPESGPGTSESATPESGPGSEPATSGSETPGSEPATSGSETPGSPAGSPTSTEEGTSTEPSEGSAPGTSTEPSEGSAPGSEPATSGSETPGTSESATPESGPGTSTEPS

SEQ ID NO: 194 - protein, 828 aa, synthetic construct
  REGION 1..828: note = Synthetic
PESGPGTSTEPSEGSAPGSPAGSPTSTEEGTSTEPSEGSAPGTSTEPSEGSAPGTSESATPESGPGSEPATSGSETPGSEPATSGSETPGSPAGSPTSTEEGTSESATPESGPGTSTEPSEGSAPGTSTEPSEGSAPGSPAGSPTSTEEGTSTEPSEGSAPGTSTEPSEGSAPGTSESATPESGPGTSTEPSEGSAPGTSESATPESGPGSEPATSGSETPGTSTEPSEGSAPGTSTEPSEGSAPGTSESATPESGPGTSESATPESGPGSPAGSPTSTEEGTSESATPESGPGSEPATSGSETPGTSESATPESGPGTSTEPSEGSAPGTSTEPSEGSAPGTSTEPSEGSAPGTSTEPSEGSAPGTSTEPSEGSAPGTSTEPSEGSAPGSPAGSPTSTEEGTSTEPSEGSAPGTSESATPESGPGSEPATSGSETPGTSESATPESGPGSEPATSGSETPGTSESATPESGPGTSTEPSEGSAPGTSESATPESGPGSPAGSPTSTEEGSPAGSPTSTEEGSPAGSPTSTEEGTSESATPESGPGTSTEPSEGSAPGTSESATPESGPGSEPATSGSETPGTSESATPESGPGSEPATSGSETPGTSESATPESGPGTSTEPSEGSAPGSPAGSPTSTEEGTSESATPESGPGSEPATSGSETPGTSESATPESGPGSPAGSPTSTEEGSPAGSPTSTEEGTSTEPSEGSAPGTSESATPESGPGTSESATPESGPGTSESATPESGPGSEPATSGSETPGSEPATSGSETPGSPAGSPTSTEEGTSTEPSEGSAPGTSTEPSEGSAPGSEPATSGSETPGTSESAT

SEQ ID NO: 195 - protein, 869 aa, synthetic construct
  REGION 1..869: note = Synthetic
GSPGSPAGSPTSTEEGTSESATPESGPGTSTEPSEGSAPGSPAGSPTSTEEGTSTEPSEGSAPGTSTEPSEGSAPGTSESATPESGPGSEPATSGSETPGSEPATSGSETPGSPAGSPTSTEEGTSESATPESGPGTSTEPSEGSAPGTSTEPSEGSAPGSPAGSPTSTEEGTSTEPSEGSAPGTSTEPSEGSAPGTSESATPESGPGTSTEPSEGSAPGTSESATPESGPGSEPATSGSETPGTSTEPSEGSAPGTSTEPSEGSAPGTSESATPESGPGTSESATPESGPGSPAGSPTSTEEGTSESATPESGPGSEPATSGSETPGTSESATPESGPGTSTEPSEGSAPGTSTEPSEGSAPGTSTEPSEGSAPGTSTEPSEGSAPGTSTEPSEGSAPGTSTEPSEGSAPGSPAGSPTSTEEGTSTEPSEGSAPGTSESATPESGPGSEPATSGSETPGTSESATPESGPGSEPATSGSETPGTSESATPESGPGTSTEPSEGSAPGTSESATPESGPGSPAGSPTSTEEGSPAGSPTSTEEGSPAGSPTSTEEGTSESATPESGPGTSTEPSEGSAPGTSESATPESGPGSEPATSGSETPGTSESATPESGPGSEPATSGSETPGTSESATPESGPGTSTEPSEGSAPGSPAGSPTSTEEGTSESATPESGPGSEPATSGSETPGTSESATPESGPGSPAGSPTSTEEGSPAGSPTSTEEGTSTEPSEGSAPGTSESATPESGPGTSESATPESGPGTSESATPESGPGSEPATSGSETPGSEPATSGSETPGSPAGSPTSTEEGTSTEPSEGSAPGTSTEPSEGSAPGSEPATSGSETPGTSESATPESGPGTSTEPSEGSAPGR

SEQ ID NO: 196 - protein, 144 aa, synthetic construct
  REGION 1..144: note = Synthetic
SAGSPGSPAGSPTSTEEGTSESATPESGPGTSTEPSEGSAPGSPAGSPTSTEEGTSTEPSEGSAPGTSTEPSEGSAPGTSESATPESGPGSEPATSGSETPGSEPATSGSETPGSPAGSPTSTEEGTSESATPESGPGTESASR

SEQ ID NO: 197 - protein, 288 aa, synthetic construct
  REGION 1..288: note = Synthetic
SAGSPTGPGSEPATSGSETPGTSESATPESGPGSEPATSGSETPGTSESATPESGPGTSTEPSEGSAPGSPAGSPTSTEEGTSESATPESGPGSEPATSGSETPGTSESATPESGPGSPAGSPTSTEEGSPAGSPTSTEEGTSTEPSEGSAPGTSESATPESGPGTSESATPESGPGTSESATPESGPGSEPATSGSETPGSEPATSGSETPGSPAGSPTSTEEGTSTEPSEGSAPGTSTEPSEGSAPGSEPATSGSETPGTSESATPESGPGTSTEPSEGSAPSASR

SEQ ID NO: 198 - protein, 432 aa, synthetic construct
  REGION 1..432: note = Synthetic
SAGSPGSPAGSPTSTEEGTSESATPESGPGTSTEPSEGSAPGSPAGSPTSTEEGTSTEPSEGSAPGTSTEPSEGSAPGTSESATPESGPGSEPATSGSETPGSEPATSGSETPGSPAGSPTSTEEGTSESATPESGPGTSTEPSEGSAPGTSTEPSEGSAPGSPAGSPTSTEEGTSTEPSEGSAPGTSTEPSEGSAPGTSESATPESGPGTSTEPSEGSAPGTSESATPESGPGSEPATSGSETPGTSTEPSEGSAPGTSTEPSEGSAPGTSESATPESGPGTSESATPESGPGSPAGSPTSTEEGTSESATPESGPGSEPATSGSETPGTSESATPESGPGTSTEPSEGSAPGTSTEPSEGSAPGTSTEPSEGSAPGTSTEPSEGSAPGTSTEPSEGSAPGTSTEPSEGSAPGSPAGSPTSTEEGTESASR

SEQ ID NO: 199 - protein, 576 aa, synthetic construct
  REGION 1..576: note = Synthetic
SAGSPTEEGTSESATPESGPGSEPATSGSETPGTSESATPESGPGTSTEPSEGSAPGTSTEPSEGSAPGTSTEPSEGSAPGTSTEPSEGSAPGTSTEPSEGSAPGTSTEPSEGSAPGSPAGSPTSTEEGTSTEPSEGSAPGTSESATPESGPGSEPATSGSETPGTSESATPESGPGSEPATSGSETPGTSESATPESGPGTSTEPSEGSAPGTSESATPESGPGSPAGSPTSTEEGSPAGSPTSTEEGSPAGSPTSTEEGTSESATPESGPGTSTEPSEGSAPGTSESATPESGPGSEPATSGSETPGTSESATPESGPGSEPATSGSETPGTSESATPESGPGTSTEPSEGSAPGSPAGSPTSTEEGTSESATPESGPGSEPATSGSETPGTSESATPESGPGSPAGSPTSTEEGSPAGSPTSTEEGTSTEPSEGSAPGTSESATPESGPGTSESATPESGPGTSESATPESGPGSEPATSGSETPGSEPATSGSETPGSPAGSPTSTEEGTSTEPSEGSAPGTSTEPSEGSAPGSEPATSGSETPGTSESATPESGPGTSTEPSEGSAPSASR

SEQ ID NO: 200 - protein, 864 aa, synthetic construct
  REGION 1..864: note = Synthetic
SAGSPGSPAGSPTSTEEGTSESATPESGPGTSTEPSEGSAPGSPAGSPTSTEEGTSTEPSEGSAPGTSTEPSEGSAPGTSESATPESGPGSEPATSGSETPGSEPATSGSETPGSPAGSPTSTEEGTSESATPESGPGTSTEPSEGSAPGTSTEPSEGSAPGSPAGSPTSTEEGTSTEPSEGSAPGTSTEPSEGSAPGTSESATPESGPGTSTEPSEGSAPGTSESATPESGPGSEPATSGSETPGTSTEPSEGSAPGTSTEPSEGSAPGTSESATPESGPGTSESATPESGPGSPAGSPTSTEEGTSESATPESGPGSEPATSGSETPGTSESATPESGPGTSTEPSEGSAPGTSTEPSEGSAPGTSTEPSEGSAPGTSTEPSEGSAPGTSTEPSEGSAPGTSTEPSEGSAPGSPAGSPTSTEEGTSTEPSEGSAPGTSESATPESGPGSEPATSGSETPGTSESATPESGPGSEPATSGSETPGTSESATPESGPGTSTEPSEGSAPGTSESATPESGPGSPAGSPTSTEEGSPAGSPTSTEEGSPAGSPTSTEEGTSESATPESGPGTSTEPSEGSAPGTSESATPESGPGSEPATSGSETPGTSESATPESGPGSEPATSGSETPGTSESATPESGPGTSTEPSEGSAPGSPAGSPTSTEEGTSESATPESGPGSEPATSGSETPGTSESATPESGPGSPAGSPTSTEEGSPAGSPTSTEEGTSTEPSEGSAPGTSESATPESGPGTSESATPESGPGTSESATPESGPGSEPATSGSETPGSEPATSGSETPGSPAGSPTSTEEGTSTEPSEGSAPGTSTEPSEGSAPGSEPATSGSETPGTSESATPESGPGTESASR

SEQ ID NO: 201 - protein, 712 aa, synthetic construct
  REGION 1..712: note = Synthetic
PGSPAGSPTSTEEGTSESATPESGPGTSTEPSEGSAPGSPAGSPTSTEEGTSTEPSEGSAPGTSTEPSEGSAPGTSESATPESGPGSEPATSGSETPGSEPATSGSETPGSPAGSPTSTEEGTSESATPESGPGTSTEPSEGSAPGTSTEPSEGSAPGSPAGSPTSTEEGTSTEPSEGSAPGTSTEPSEGSAPGTSESATPESGPGTSTEPSEGSAPGTSESATPESGPGSEPATSGSETPGTSTEPSEGSAPGTSTEPSEGSAPGTSESATPESGPGTSESATPESGPGSPAGSPTSTEEGTSESATPESGPGSEPATSGSETPGTSESATPESGPGTSTEPSEGSAPGTSTEPSEGSAPGTSTEPSEGSAPGTSTEPSEGSAPGTSTEPSEGSAPGTSTEPSEGSAPGSPAGSPTSTEEGTSTEPSEGSAPGTSESATPESGPGSEPATSGSETPGTSESATPESGPGSEPATSGSETPGTSESATPESGPGTSTEPSEGSAPGTSESATPESGPGSPAGSPTSTEEGSPAGSPTSTEEGSPAGSPTSTEEGTSESATPESGPGTSTEPSEGSAPGTSESATPESGPGSEPATSGSETPGTSESATPESGPGSEPATSGSETPGTSESATPESGPGTSTEPSEGSAPGSPAGSPTSTEEGTSESATPESGPGSEPATSGSETPGTSESATPESGPGSPAGSPTSTEAHHH

SEQ ID NO: 202 - protein, 864 aa, synthetic construct
  REGION 1..864: note = Synthetic
GSPGAGSPAGSPTSTEEGTSESATPESGPGTSTEPSEGSAPGSPAGSPTSTEEGTSTEPSEGSAPGTSTEPSEGSAPGTSESATPESGPGSEPATSGSETPGSEPATSGSETPGSPAGSPTSTEEGTSESATPESGPGTSTEPSEGSAPGTSTEPSEGSAPGSPAGSPTSTEEGTSTEPSEGSAPGTSTEPSEGSAPGTSESATPESGPGTSTEPSEGSAPGTSESATPESGPGSEPATSGSETPGTSTEPSEGSAPGTSTEPSEGSAPGTSESATPESGPGTSESATPESGPGSPAGSPTSTEEGTSESATPESGPGSEPATSGSETPGTSESATPESGPGTSTEPSEGSAPGTSTEPSEGSAPGTSTEPSEGSAPGTSTEPSEGSAPGTSTEPSEGSAPGTSTEPSEGSAPGSPAGSPTSTEEGTSTEPSEGSAPGTSESATPESGPGSEPATSGSETPGTSESATPESGPGSEPATSGSETPGTSESATPESGPGTSTEPSEGSAPGTSESATPESGPGSPAGSPTSTEEGSPAGSPTSTEEGSPAGSPTSTEEGTSESATPESGPGTSTEPSEGSAPGTSESATPESGPGSEPATSGSETPGTSESATPESGPGSEPATSGSETPGTSESATPESGPGTSTEPSEGSAPGSPAGSPTSTEEGTSESATPESGPGSEPATSGSETPGTSESATPESGPGSPAGSPTSTEEGSPAGSPTSTEEGTSTEPSEGSAPGTSESATPESGPGTSESATPESGPGTSESATPESGPGSEPATSGSETPGSEPATSGSETPGSPAGSPTSTEEGTSTEPSEGSAPGTSTEPSEGSAPGSEPATSGSETPGTSESATPESGPGTESASR

SEQ ID NO: 203 - protein, 288 aa, synthetic construct
  REGION 1..288: note = Synthetic
SPAGSPTSTEEGTSESATPESGPGTSTEPSEGSAPGTSESATPESGPGSEPATSGSETPGTSESATPESGPGSEPATSGSETPGTSESATPESGPGTSTEPSEGSAPGSPAGSPTSTEEGTSESATPESGPGSEPATSGSETPGTSESATPESGPGSPAGSPTSTEEGSPAGSPTSTEEGTSTEPSEGSAPGTSESATPESGPGTSESATPESGPGTSESATPESGPGSEPATSGSETPGSEPATSGSETPGSPAGSPTSTEEGTSTEPSEGSAPGTSTEPSEGSAPG

SEQ ID NO: 204 - protein, 284 aa, synthetic construct
  REGION 1..284: note = Synthetic
GTSESATPESGPGSEPATSGSETPGTSESATPESGPGSEPATSGSETPGTSESATPESGPGTSTEPSEGSAPGSPAGSPTSTEEGTSESATPESGPGSEPATSGSETPGTSESATPESGPGSPAGSPTSTEEGSPAGSPTSTEEGTSTEPSEGSAPGTSESATPESGPGTSESATPESGPGTSESATPESGPGSEPATSGSETPGSEPATSGSETPGSPAGSPTSTEEGTSTEPSEGSAPGTSTEPSEGSAPGSEPATSGSETPGTSESATPESGPGTSTEPSE

SEQ ID NO: 205 - protein, 292 aa, synthetic construct
  REGION 1..292: note = Synthetic
SPAGSPTSTEEGTSESATPESGPGTSTEPSEGSAPGTSESATPESGPGSEPATSGSETPGTSESATPESGPGSEPATSGSETPGTSESATPESGPGTSTEPSEGSAPGSPAGSPTSTEEGTSESATPESGPGSEPATSGSETPGTSESATPESGPGSPAGSPTSTEEGSPAGSPTSTEEGTSTEPSEGSAPGTSESATPESGPGTSESATPESGPGTSESATPESGPGSEPATSGSETPGSEPATSGSETPGSPAGSPTSTEEGTSTEPSEGSAPGTSTEPSEGSAPGGSAP

SEQ ID NO: 206 - protein, 293 aa, synthetic construct
  REGION 1..293: note = Synthetic
PGSPAGSPTSTEEGTSESATPESGPGTSTEPSEGSAPGSPAGSPTSTEEGTSTEPSEGSAPGTSTEPSEGSAPGTSESATPESGPGSEPATSGSETPGSEPATSGSETPGSPAGSPTSTEEGTSESATPESGPGTSTEPSEGSAPGTSTEPSEGSAPGSPAGSPTSTEEGTSTEPSEGSAPGTSTEPSEGSAPGTSESATPESGPGTSTEPSEGSAPGTSESATPESGPGSEPATSGSETPGTSTEPSEGSAPGTSTEPSEGSAPGTSESATPESGPGTSESATPEGAAEPEA

SEQ ID NO: 207 - protein, 300 aa, synthetic construct
  REGION 1..300: note = Synthetic
PGSPAGSPTSTEEGTSESATPESGPGTSTEPSEGSAPGSPAGSPTSTEEGTSTEPSEGSAPGTSTEPSEGSAPGTSESATPESGPGSEPATSGSETPGSEPATSGSETPGSPAGSPTSTEEGTSESATPESGPGTSTEPSEGSAPGTSTEPSEGSAPGSPAGSPTSTEEGTSTEPSEGSAPGTSTEPSEGSAPGTSESATPESGPGTSTEPSEGSAPGTSESATPESGPGSEPATSGSETPGTSTEPSEGSAPGTSTEPSEGSAPGTSESATPESGPGTSESATPESGPGSPAGAAEPEA

SEQ ID NO: 208 - protein, 864 aa, synthetic construct
  REGION 1..864: note = Synthetic
AGSPTSTEEGTSESATPESGPGTSTEPSEGSAPGSPAGSPTSTEEGTSTEPSEGSAPGTSTEPSEGSAPGTSESATPESGPGSEPATSGSETPGSEPATSGSETPGSPAGSPTSTEEGTSESATPESGPGTSTEPSEGSAPGTSTEPSEGSAPGSPAGSPTSTEEGTSTEPSEGSAPGTSTEPSEGSAPGTSESATPESGPGTSTEPSEGSAPGTSESATPESGPGSEPATSGSETPGTSTEPSEGSAPGTSTEPSEGSAPGTSESATPESGPGTSESATPESGPGSPAGSPTSTEEGTSESATPESGPGSEPATSGSETPGTSESATPESGPGTSTEPSEGSAPGTSTEPSEGSAPGTSTEPSEGSAPGTSTEPSEGSAPGTSTEPSEGSAPGTSTEPSEGSAPGSPAGSPTSTEEGTSTEPSEGSAPGTSESATPESGPGSEPATSGSETPGTSESATPESGPGSEPATSGSETPGTSESATPESGPGTSTEPSEGSAPGTSESATPESGPGSPAGSPTSTEEGSPAGSPTSTEEGSPAGSPTSTEEGTSESATPESGPGTSTEPSEGSAPGTSESATPESGPGSEPATSGSETPGTSESATPESGPGSEPATSGSETPGTSESATPESGPGTSTEPSEGSAPGSPAGSPTSTEEGTSESATPESGPGSEPATSGSETPGTSESATPESGPGSPAGSPTSTEEGSPAGSPTSTEEGTSTEPSEGSAPGTSESATPESGPGTSESATPESGPGTSESATPESGPGSEPATSGSETPGSEPATSGSETPGSPAGSPTSTEEGTSTEPSEGSAPGTSTEPSEGSAPGSEPATSGSETPGTSESATPESGPGTSTEPSEGAAEPEA

SEQ ID NO: 209 - protein, 867 aa, synthetic construct
  REGION 1..867: note = Synthetic
GSPAGSPTSTEEGTSESATPESGPGTSTEPSEGSAPGSPAGSPTSTEEGTSTEPSEGSAPGTSTEPSEGSAPGTSESATPESGPGSEPATSGSETPGSEPATSGSETPGSPAGSPTSTEEGTSESATPESGPGTSTEPSEGSAPGTSTEPSEGSAPGSPAGSPTSTEEGTSTEPSEGSAPGTSTEPSEGSAPGTSESATPESGPGTSTEPSEGSAPGTSESATPESGPGSEPATSGSETPGTSTEPSEGSAPGTSTEPSEGSAPGTSESATPESGPGTSESATPESGPGSPAGSPTSTEEGTSESATPESGPGSEPATSGSETPGTSESATPESGPGTSTEPSEGSAPGTSTEPSEGSAPGTSTEPSEGSAPGTSTEPSEGSAPGTSTEPSEGSAPGTSTEPSEGSAPGSPAGSPTSTEEGTSTEPSEGSAPGTSESATPESGPGSEPATSGSETPGTSESATPESGPGSEPATSGSETPGTSESATPESGPGTSTEPSEGSAPGTSESATPESGPGSPAGSPTSTEEGSPAGSPTSTEEGSPAGSPTSTEEGTSESATPESGPGTSTEPSEGSAPGTSESATPESGPGSEPATSGSETPGTSESATPESGPGSEPATSGSETPGTSESATPESGPGTSTEPSEGSAPGSPAGSPTSTEEGTSESATPESGPGSEPATSGSETPGTSESATPESGPGSPAGSPTSTEEGSPAGSPTSTEEGTSTEPSEGSAPGTSESATPESGPGTSESATPESGPGTSESATPESGPGSEPATSGSETPGSEPATSGSETPGSPAGSPTSTEEGTSTEPSEGSAPGTSTEPSEGSAPGSEPATSGSETPGTSESATPESGPGTSTEPSEGAAEPEA

SEQ ID NO: 210 - protein, 867 aa, synthetic construct
  REGION 1..867: note = Synthetic
SPGSPAGSPTSTEEGTSESATPESGPGTSTEPSEGSAPGSPAGSPTSTEEGTSTEPSEGSAPGTSTEPSEGSAPGTSESATPESGPGSEPATSGSETPGSEPATSGSETPGSPAGSPTSTEEGTSESATPESGPGTSTEPSEGSAPGTSTEPSEGSAPGSPAGSPTSTEEGTSTEPSEGSAPGTSTEPSEGSAPGTSESATPESGPGTSTEPSEGSAPGTSESATPESGPGSEPATSGSETPGTSTEPSEGSAPGTSTEPSEGSAPGTSESATPESGPGTSESATPESGPGSPAGSPTSTEEGTSESATPESGPGSEPATSGSETPGTSESATPESGPGTSTEPSEGSAPGTSTEPSEGSAPGTSTEPSEGSAPGTSTEPSEGSAPGTSTEPSEGSAPGTSTEPSEGSAPGSPAGSPTSTEEGTSTEPSEGSAPGTSESATPESGPGSEPATSGSETPGTSESATPESGPGSEPATSGSETPGTSESATPESGPGTSTEPSEGSAPGTSESATPESGPGSPAGSPTSTEEGSPAGSPTSTEEGSPAGSPTSTEEGTSESATPESGPGTSTEPSEGSAPGTSESATPESGPGSEPATSGSETPGTSESATPESGPGSEPATSGSETPGTSESATPESGPGTSTEPSEGSAPGSPAGSPTSTEEGTSESATPESGPGSEPATSGSETPGTSESATPESGPGSPAGSPTSTEEGSPAGSPTSTEEGTSTEPSEGSAPGTSESATPESGPGTSESATPESGPGTSESATPESGPGSEPATSGSETPGSEPATSGSETPGSPAGSPTSTEEGTSTEPSEGSAPGTSTEPSEGSAPGSEPATSGSETPGTSESATPESGPGTSTEPSEGSAPG

SEQ ID NO: 211 - protein, 868 aa, synthetic construct
  REGION 1..868: note = Synthetic
PGSPAGSPTSTEEGTSESATPESGPGTSTEPSEGSAPGSPAGSPTSTEEGTSTEPSEGSAPGTSTEPSEGSAPGTSESATPESGPGSEPATSGSETPGSEPATSGSETPGSPAGSPTSTEEGTSESATPESGPGTSTEPSEGSAPGTSTEPSEGSAPGSPAGSPTSTEEGTSTEPSEGSAPGTSTEPSEGSAPGTSESATPESGPGTSTEPSEGSAPGTSESATPESGPGSEPATSGSETPGTSTEPSEGSAPGTSTEPSEGSAPGTSESATPESGPGTSESATPESGPGSPAGSPTSTEEGTSESATPESGPGSEPATSGSETPGTSESATPESGPGTSTEPSEGSAPGTSTEPSEGSAPGTSTEPSEGSAPGTSTEPSEGSAPGTSTEPSEGSAPGTSTEPSEGSAPGSPAGSPTSTEEGTSTEPSEGSAPGTSESATPESGPGSEPATSGSETPGTSESATPESGPGSEPATSGSETPGTSESATPESGPGTSTEPSEGSAPGTSESATPESGPGSPAGSPTSTEEGSPAGSPTSTEEGSPAGSPTSTEEGTSESATPESGPGTSTEPSEGSAPGTSESATPESGPGSEPATSGSETPGTSESATPESGPGSEPATSGSETPGTSESATPESGPGTSTEPSEGSAPGSPAGSPTSTEEGTSESATPESGPGSEPATSGSETPGTSESATPESGPGSPAGSPTSTEEGSPAGSPTSTEEGTSTEPSEGSAPGTSESATPESGPGTSESATPESGPGTSESATPESGPGSEPATSGSETPGSEPATSGSETPGSPAGSPTSTEEGTSTEPSEGSAPGTSTEPSEGSAPGSEPATSGSETPGTSESATPESGPGTSTEPSEGAAEPEA

SEQ ID NO: 212 - protein, 584 aa, synthetic construct
  REGION 1..584: note = Synthetic
PGSPAGSPTSTEEGTSESATPESGPGTSTEPSEGSAPGSPAGSPTSTEEGTSTEPSEGSAPGTSTEPSEGSAPGTSESATPESGPGSEPATSGSETPGSEPATSGSETPGSPAGSPTSTEEGTSESATPESGPGTSTEPSEGSAPGTSTEPSEGSAPGSPAGSPTSTEEGTSTEPSEGSAPGTSTEPSEGSAPGTSESATPESGPGTSTEPSEGSAPGTSESATPESGPGSEPATSGSETPGTSTEPSEGSAPGTSTEPSEGSAPGTSESATPESGPGTSESATPESGPGSPAGSPTSTEEGTSESATPESGPGSEPATSGSETPGTSESATPESGPGTSTEPSEGSAPGTSTEPSEGSAPGTSTEPSEGSAPGTSTEPSEGSAPGTSTEPSEGSAPGTSTEPSEGSAPGSPAGSPTSTEEGTSTEPSEGSAPGTSESATPESGPGSEPATSGSETPGTSESATPESGPGSEPATSGSETPGTSESATPESGPGTSTEPSEGSAPGTSESATPESGPGSPAGSPTSTEEGSPAGSPTSTEEGSPAGSPTSTEEGTSESATPESGPGTSTEPSEGSAPGAAEPEA

SEQ ID NO: 213 - protein, 874 aa, synthetic construct
  REGION 1..874: note = Synthetic
PGSPAGSPTSTEEGTSESATPESGPGTSTEPSEGSAPGSPAGSPTSTEEGTSTEPSEGSAPGTSTEPSEGSAPGTSESATPESGPGSEPATSGSETPGSEPATSGSETPGSPAGSPTSTEEGTSESATPESGPGTSTEPSEGSAPGTSTEPSEGSAPGSPAGSPTSTEEGTSTEPSEGSAPGTSTEPSEGSAPGTSESATPESGPGTSTEPSEGSAPGTSESATPESGPGSEPATSGSETPGTSTEPSEGSAPGTSTEPSEGSAPGTSESATPESGPGTSESATPESGPGSPAGSPTSTEEGTSESATPESGPGSEPATSGSETPGTSESATPESGPGTSTEPSEGSAPGTSTEPSEGSAPGTSTEPSEGSAPGTSTEPSEGSAPGTSTEPSEGSAPGTSTEPSEGSAPGSPAGSPTSTEEGTSTEPSEGSAPGTSESATPESGPGSEPATSGSETPGTSESATPESGPGSEPATSGSETPGTSESATPESGPGTSTEPSEGSAPGTSESATPESGPGSPAGSPTSTEEGSPAGSPTSTEEGSPAGSPTSTEEGTSESATPESGPGTSTEPSEGSAPGTSESATPESGPGSEPATSGSETPGTSESATPESGPGSEPATSGSETPGTSESATPESGPGTSTEPSEGSAPGSPAGSPTSTEEGTSESATPESGPGSEPATSGSETPGTSESATPESGPGSPAGSPTSTEEGSPAGSPTSTEEGTSTEPSEGSAPGTSESATPESGPGTSESATPESGPGFTABTSESATPESGPGSEPATSGPTESGSEPATSGSETPGSPAGSPTSTEEGTSTEPSEGSAPGTESTPSEGSAPGSEPATSGSETPGTSESATPESGPGTSTEPSEGSAPGEPEA

SEQ ID NO: 214 - protein, 870 aa, synthetic construct
  REGION 1..870: note = Synthetic
PGSPAGSPTSTEEGTSESATPESGPGTSTEPSEGSAPGSPAGSPTSTEEGTSTEPSEGSAPGTSTEPSEGSAPGTSESATPESGPGSEPATSGSETPGSEPATSGSETPGSPAGSPTSTEEGTSESATPESGPGTSTEPSEGSAPGTSTEPSEGSAPGSPAGSPTSTEEGTSTEPSEGSAPGTSTEPSEGSAPGTSESATPESGPGTSTEPSEGSAPGTSESATPESGPGSEPATSGSETPGTSTEPSEGSAPGTSTEPSEGSAPGTSESATPESGPGTSESATPESGPGSPAGSPTSTEEGTSESATPESGPGSEPATSGSETPGTSESATPESGPGTSTEPSEGSAPGTSTEPSEGSAPGTSTEPSEGSAPGTSTEPSEGSAPGTSTEPSEGSAPGTSTEPSEGSAPGSPAGSPTSTEEGTSTEPSEGSAPGTSESATPESGPGSEPATSGSETPGTSESATPESGPGSEPATSGSETPGTSESATPESGPGTSTEPSEGSAPGTSESATPESGPGSPAGSPTSTEEGSPAGSPTSTEEGSPAGSPTSTEEGTSESATPESGPGTSTEPSEGSAPGTSESATPESGPGSEPATSGSETPGTSESATPESGPGSEPATSGSETPGTSESATPESGPGTSTEPSEGSAPGSPAGSPTSTEEGTSESATPESGPGSEPATSGSETPGTSESATPESGPGSPAGSPTSTEEGSPAGSPTSTEEGTSTEPSEGSAPGTSESATPESGPGTSESATPESGPGTSESATPESGPGSEPATSGPTESGSEPATSGSETPGSPAGSPTSTEEGTSTEPSEGSAPGTSTEPSEGSAPGSEPATSGSETPGTSESATPESGPGTSTEPSEGSAPGEPEA

SEQ ID NO: 215 - protein, 870 aa, synthetic construct
  REGION 1..870: note = Synthetic
PGSPAGSPTSTEEGTSESATPESGPGTSTEPSEGSAPGSPAGSPTSTEEGTSTEPSEGSAPGTSTEPSEGSAPGTSESATPESGPGSEPATSGSETPGSEPATSGSETPGSPAGSPTSTEEGTSESATPESGPGTSTEPSEGSAPGTSTEPSEGSAPGSPAGSPTSTEEGTSTEPSEGSAPGTSTEPSEGSAPGTSESATPESGPGTSTEPSEGSAPGTSESATPESGPGSEPATSGSETPGTSTEPSEGSAPGTSTEPSEGSAPGTSESATPESGPGTSESATPESGPGSPAGSPTSTEEGTSESATPESGPGSEPATSGSETPGTSESATPESGPGTSTEPSEGSAPGTSTEPSEGSAPGTSTEPSEGSAPGTSTEPSEGSAPGTSTEPSEGSAPGTSTEPSEGSAPGSPAGSPTSTEEGTSTEPSEGSAPGTSESATPESGPGSEPATSGSETPGTSESATPESGPGSEPATSGSETPGTSESATPESGPGTSTEPSEGSAPGTSESATPESGPGSPAGSPTSTEEGSPAGSPTSTEEGSPAGSPTSTEEGTSESATPESGPGTSTEPSEGSAPGTSESATPESGPGSEPATSGSETPGTSESATPESGPGSEPATSGSETPGTSESATPESGPGTSTEPSEGSAPGSPAGSPTSTEEGTSESATPESGPGSEPATSGSETPGTSESATPESGPGSPAGSPTSTEEGSPAGSPTSTEEGTSTEPSEGSAPGTSESATPESGPGTSESATPESGPGTSESATPESGPGSEPATSGSETPGSEPATSGSETPGSPAGSPTSTEEGTSTEPSEGSAPGTESTPSEGSAPGSEPATSGSETPGTSESATPESGPGTSTEPSEGSAPGEPEA

SEQ ID NO: 216 - protein, 294 aa, synthetic construct
  REGION 1..294: note = Synthetic
ASSPAGSPTSTESGTSESATPESGPGTETEPSEGSAPGTSESATPESGPGSEPATSGSETPGTSESATPESGPGSTPAESGSETPGTSESATPESGPGTSTEPSEGSAPGSPAGSPTSTEEGTSESATPESGPGESPATSGSTPEGTSESATPESGPGSPAGSPTSTEEGSPAGSPTSTEEGTSTEPSEGSAPGTSESATPESGPGTSESATPESGPGTSESATPESGPGSEPATSGSETPGSEPATSGSETPGSPAGSPTSTEEGTSTEPSEGSAPGTSTEPSEGSAPGGSAP

SEQ ID NO: 217 - protein, 294 aa, synthetic construct
  REGION 1..294: note = Synthetic
ASSPAGSPTSTESGTSESATPESGPGTSTEPSEGSAPGTSESATPESGPGSEPATSGSETPGTSESATPESGPGSEPATSGSETPGTSESATPESGPGTSTEPSEGSAPGSPAGSPTSTEEGTSESATPESGPGESPATSGSTPEGTSESATPESGPGSPAGSPTSTEEGSPAGSPTSTEEGTSTEPSEGSAPGTSESATPESGPGTSESATPESGPGTSESATPESGPGSEPATSGSETPGSEPATSGSETPGSPAGSPTSTEEGTSTEPSEGSAPGTSTEPSEGSAPGGSAP

SEQ ID NO: 218 - protein, 294 aa, synthetic construct
  REGION 1..294: note = Synthetic
ASSPAGSPTSTESGTSESATPESGPGTSTEPSEGSAPGTSESATPESGPGSEPATSGSETPGTSESATPESGPGSTPAESGSETPGTSESATPESGPGTSTEPSEGSAPGSPAGSPTSTEEGTSESATPESGPGEEPATSGSTPEGTSESATPESGPGSPAGSPTSTEEGSPAGSPTSTEEGTSTEPSEGSAPGTSESATPESGPGTSESATPESGPGTSESATPESGPGSEPATSGSETPGSEPATSGSETPGSPAGSPTSTEEGTSTEPSEGSAPGTSTEPSEGSAPGGSAP

SEQ ID NO: 219 - protein, 294 aa, synthetic construct
  REGION 1..294: note = Synthetic
ASSPAGSPTSTESGTSESATPESGPGTSTEPSEGSAPGTSESATPESGPGSEPATSGSETPGTSESATPESGPGSTPAESGSETPGTSESATPESGPGTSTEPSEGSAPGSPAGSPTSTEEGTSESATPESGPGSEPATSGSETPGTSESATPESGPGSPAGSPTSTEEGSPAGSPTSTEEGTSTEPSEGSAPGTSESATPESGPGTSESATPESGPGTSESATPESGPGSEPATSGSETPGSEPATSGSETPGSPAGSPTSTEEGTSTEPSEGSAPGTSTEPSEGSAPGGSAP

SEQ ID NO: 220 - protein, 866 aa, synthetic construct
  REGION 1..866: note = Synthetic
PGSPAGSPTSTEEGTSESATPESGPGTSTEPSEGSAPGSPAGSPTSTEEGTSTEPSEGSAPGTSTEPSEGSAPGTSESATPESGPGSEPATSGSETPGSEPATSGSETPGSPAGSPTSTEEGTSESATPESGPGTSTEPSEGSAPGTSTEPSEGSAPGSPAGSPTSTEEGTSTEPSEGSAPGTSTEPSEGSAPGTSESATPESGPGTSTEPSEGSAPGTSESATPESGPGSEPATSGSETPGTSTEPSEGSAPGTSTEPSEGSAPGTSESATPESGPGTSESATPESGPGSPAGSPTSTEEGTSESATPESGPGSEPATSGSETPGTSESATPESGPGTSTEPSEGSAPGTSTEPSEGSAPGTSTEPSEGSAPGTSTEPSEGSAPGTSTEPSEGSAPGTSTEPSEGSAPGSPAGSPTSTEEGTSTEPSEGSAPGTSESATPESGPGSEPATSGSETPGTSESATPESGPGSEPATSGSETPGTSESATPESGPGTSTEPSEGSAPGTSESATPESGPGSPAGSPTSTEEGSPAGSPTSTEEGSPAGSPTSTEEGTSESATPESGPGTSTEPSEGSAPGTSESATPESGPGSEPATSGSETPGTSESATPESGPGSEPATSGSETPGTSESATPESGPGTSTEPSEGSAPGSPAGSPTSTEEGTSESATPESGPGSEPATSGSETPGTSESATPESGPGSPAGSPTSTEEGSPAGSPTSTEEGTSTEPSEGSAPGTSESATPESGPGTSESATPESGPGTSESATPESGPGSEPATSGSETPGSEPATSGSETPGSPAGSPTSTEEGTSTEPSEGSAPGTESTPSEGSAPGSEPATSGSETPGTSESATPESGPGTSTEPSEGSAPG

SEQ ID NO: 221 - protein, 578 aa, synthetic construct
  REGION 1..578: note = Synthetic
PGSPAGSPTSTEEGTSESATPESGPGSEPATSGSETPGTSESATPESGPGTSTEPSEGSAPGTSTEPSEGSAPGTSTEPSEGSAPGTSTEPSEGSAPGTSTEPSEGSAPGTSTEPSEGSAPGSPAGSPTSTEEGTSTEPSEGSAPGTSESATPESGPGSEPATSGSETPGTSESATPESGPGSEPATSGSETPGTSESATPESGPGTSTEPSEGSAPGTSESATPESGPGSPAGSPTSTEEGSPAGSPTSTEEGSPAGSPTSTEEGTSESATPESGPGTSTEPSEGSAPGTSESATPESGPGSEPATSGSETPGTSESATPESGPGSEPATSGSETPGTSESATPESGPGTSTEPSEGSAPGSPAGSPTSTEEGTSESATPESGPGSEPATSGSETPGTSESATPESGPGSPAGSPTSTEEGSPAGSPTSTEEGTSTEPSEGSAPGTSESATPESGPGTSESATPESGPGTSESATPESGPGSEPATSGSETPGSEPATSGSETPGSPAGSPTSTEEGTSTEPSEGSAPGTESTPSEGSAPGSEPATSGSETPGTSESATPESGPGTSTEPSEGSAPG

SEQ ID NO: 222 - protein, 1152 aa, synthetic construct
  REGION 1..1152: note = Synthetic
SAGSPGSPAGSPTSTEEGTSESATPESGPGTSTEPSEGSAPGSPAGSPTSTEEGTSTEPSEGSAPGTSTEPSEGSAPGTSESATPESGPGSTPAESGSETPGSEPATSGSETPGSPAGSPTSTEEGTSESATPESGPGTSTEPSEGSAPGTSTEPSEGSAPGSPAGSPTSTEEGTSTEPSEGSAPGTSTEPSEGSAPGTSESATPESGPGTSTEPSEGSAPGTSESATPESGPGSEPATSGSTETPGTSTEPSEGSAPGTSTEPSEGSAPGTSESATPESGPGTSESATPESGPGSPAGSPTSTEEGTSESATPESGPGSEPATSGSETPGTSESATPESGPGTSTEPSEGSAPGTSTEPSEGSAPGTSTEPSEGSAPGTSTEPSEGSAPGTSTEPSEGSAPGTSTEPSEGSAPGSPAGSPTSTEEGTSTEPSEGSAPGTSESATPESGPGSEPATSGSETPGTSESATPESGPGSEPATSGSETPGTSESATPESGPGTSTEPSEGSAPGTSESATPESGPGSPAGSPTSTEEGSPAGSPTSTEEGSPAGSPTSTEEGTSESATPESGPGTSTEPSEGSAPGTSESATPESGPGSEPATSGSETPGTSESATPESGPGSEPATSGSETPGTSESATPESGPGTSTEPSEGSAPGSPAGSPTSTEEGTSESATPESGPGSEPATSGSETPGTSESATPESGPGSPAGSPTSTEEGSPAGSPTSTEEGTSTEPSEGSAPGTSESATPESGPGTSESATPESGPGTSESATPESGPGSEPATSGSETPGSEPATSGSETPGSPAGSPTSTEEGTSTEPSEGSAPGTSTEPSEGSAPGSEPATSGSETPGTSESATPESGPGTSTEPSEGSAPGSPAGSPTSTEEGTSESATPESGPGTSTEPSEGSAPGSPAGSPTSTEEGTSTEPSEGSAPGTSTEPSEGSAPGTSESATPESGPGSEPATSGSETPGSEPATSGSETPGSPAGSPTSTEEGTSESATPESGPGTSTEPSEGSAPGTSTEPSEGSAPGSPAGSPTSTEEGTSTEPSEGSAPGTSTEPSEGSAPGTSESATPESGPGTSTEPSEGSAPGTSESATPESGPGSEPATSGSETPGTSTEPSEGSAPGTSTEPSEGSAPGTSESATPESGPGTESAS

SEQ ID NO: 223 - protein, 1153 aa, synthetic construct
  REGION 1..1153: note = Synthetic
SAGSPGSPAGSPTSTEEGTSESATPESGPGTSTEPSEGSAPGSPAGSPTSTEEGTSTEPSEGSAPGTSTEPSEGSAPGTSESATPESGPGSEPATSGSETPGSEPATSGSETPGSPAGSPTSTEEGTSESATPESGPGTSTEPSEGSAPGTSTEPSEGSAPGSPAGSPTSTEEGTSTEPSEGSAPGTSTEPSEGSAPGTSESATPESGPGTSTEPSEGSAPGTSESATPESGPGSEPATSGSETPGTSTEPSEGSAPGTSTEPSEGSAPGTSESATPESGPGTSESATPESGPGSPAGSPTSTEEGTSESATPESGPGSEPATSGSETPGTSESATPESGPGTSTEPSEGSAPGTSTEPSEGSAPGTSTEPSEGSAPGTSTEPSEGSAPGTSTEPSEGSAPGTSTEPSEGSAPGSPAGSPTSTEEGTSTEPSEGSAPGTSESATPESGPGSEPATSGSETPGTSESATPESGPGSEPATSGSETPGTSESATPESGPGTSTEPSEGSAPGTSESATPESGPGSPAGSPTSTEEGSPAGSPTSTEEGSPAGSPTSTEEGTSESATPESGPGTSTEPSEGSAPGTSESATPESGPGSEPATSGSETPGTSESATPESGPGSEPATSGSETPGTSESATPESGPGTSTEPSEGSAPGSPAGSPTSTEEGTSESATPESGPGSEPATSGSETPGTSESATPESGPGSPAGSPTSTEEGSPAGSPTSTEEGTSTEPSEGSAPGTSESATPESGPGTSESATPESGPGTSESATPESGPGSEPATSGSETPGSEPATSGSETPGSPAGSPTSTEEGTSTEPSEGSAPGTSTEPSEGSAPGSEPATSGSETPGTSESATPESGPGTSTEPSEGSAPGSPAGSPTSTEEGTSESATPESGPGTSTEPSEGSAPGSPAGSPTSTEEGTSTEPSEGSAPGTSTEPSEGSAPGTSESATPESGPGSEPATSGSETPGSEPATSGSTETPGSPAGSPTSTEEGTSESATPESGPGTSTEPSEGSAPGTSTEPSEGSAPGSPAGSPTSTEEGTSTEPSEGSAPGTATESPEGSAPGTSESATPESGPGTSTEPSEGSAPGTSAESATPESGPGSEPATSGSETPGTSTEPSEGSAPGTSTEPSEGSAPGTSESATPESGPGTESAS

SEQ ID NO: 224 - protein, 864 aa, synthetic construct
  REGION 1..864: note = Synthetic
GSPAGSPTSTEEGTSESATPESGPGTSTEPSEGSAPGSPAGSPTSTEEGTSTEPSEGSAPGTSTEPSEGSAPATSESATPESGPGSEPATSGSETPGSEPATSGSETPGSPAGSPTSTEEGTSESASPESGPGTSTEPSEGSAPGTSTEPSEGSAPGSPAGSPTSTEEGTSTEPSEGSAPGTSTEPSEGSAPGTSESATPESGPGTSTEPSEGSAPGTSESATPESGPGSEPATSGSETPGTSTEPSEGSAPGTSTEPSEGSAPGTSESATPESGPGTSESATPESGPGSPAGSPTSTEEGTSESATPESGPGSEPATSGSETPGTSESATPESGPGTSTEPSEGSAPGTSTEPSEGSAPGTSTEPSEGSAPGTSTEPSEGSAPGTSTEPSEGSAPGTSTEPSEGSAPGSPAGSPTSTEEGTSTEPSEGSAPGTSESATPESGPGSEPATSGSETPGTSESATPESGPGSEPATSGSETPGTSESATPESGPGTSTEPSEGSAPGTSESATPESGPGSPAGSPTSTEEGSPAGSPTSTEEGSPAGSPTSTEEGTSESATPESGPGTSTEPSEGSAPGTSESATPESGPGSEPATSGSETPGTSESATPESGPGSEPATSGSETPGTSESATPESGPGTSTEPSEGSAPGSPAGSPTSTEEGTSESATPESGPGSEPATSGSETPGTSESATPESGPGSPAGSPTSTEEGSPAGSPTSTEEGTSTEPSEGSAPGTSESATPESGPGTSESATPESGPGTSESATPESGPGSEPATSGSETPGSEPATSGSETPGSPAGSPTSTEEGTSTEPSEGSAPGTSTEPSEGSAPGSEPATSGSETPGTSESATPESGPGTSTEPSEGSAP

SEQ ID NO: 225 - protein, 864 aa, synthetic construct
  REGION 1..864: note = Synthetic
GSPAGSPTSTEEGTSESATPESGPGTSTEPSEGSAPGSPAGSPTSTEEGTSTEPSEGSAPGTSTEPSEGSAPGTSESATPESGPGSESATSGSETPGSEPATSGSETPGSPAGSPTSTEEGTSESATPESGPGTSTEPSEGSAPGTSTEPSEGSAPGSPAGSPTSTEEGTSTEPSEGSAPGTSTEPSEGSAPGTSESATPESGPGTSTEPSEGSAPGTSESATPESGPGSEPATSGSETPGTSTEPSEGSAPGTSTEPSEGSAPGTSESATPESGPGTSESATPESGPGSPAGSPTSTEEGTSESATPESGPGSEPATSGSETPGTSESATPESGPGTSTEPSEGSAPGTSTEPSEGSAPGTSTEPSEGSAPGTSTEPSEGSAPGTSTEPSEGSAPGTSTEPSEGSAPGSPAGSPTSTEEGTSTEPSEGSAPGTSESATPESGPGSEPATSGSETPGTSESATPESGPGSEPATSGSETPGTSESATPESGPGTSTEPSEGSAPGTSESATPESGPGSPAGSPTSTEEGSPAGSPTSTEEGSPAGSPTSTEEGTSESATPESGPGTSTEPSEGSAPGTSESATPESGPGSEPATSGSETPGTSESATPESGPGSEPATSGSETPGTSESATPESGPGTSTEPSEGSAPGSPAGSPTSTEEGTSESATPESGPGSEPATSGSETPGTSESATPESGPGSPAGSPTSTEEGSPAGSPTSTEEGTSTEPSEGSAPGTSESATPESGPGTSESATPESGPGTSESATPESGPGSEPATSGSETPGSEPATSGSETPGSPAGSPTSTEEGTSTEPSEGSAPGTSTEPSEGSAPGSEPATSGSETPGTSESATPESGPGTSTEPSEGSAP

SEQ ID NO: 226 - protein, 292 aa, synthetic construct
  REGION 1..292: note = Synthetic
SPAGSPTSTESGTSESATPESGPGTSTEPSEGSAPGTSESATPESGPGSEPATSGSETPGTSESATPESGPGSTPAESGSETPGTSESATPESGPGTSTEPSEGSAPGSPAGSPTSTEEGTSESATPESGPGSEPATSGSETPGTSESATPESGPGSPAGSPTSTEEGSPAGSPTSTEEGTSTEPSEGSAPGTSESATPESGPGTSESATPESGPGTSESATPESGPGSEPATSGSETPGSEPATSGSETPGSPAGSPTSTEEGTSTEPSEGSAPGTSTEPSEGSAPGGSAP

SEQ ID NO: 227 - protein, 582 aa, synthetic construct
  REGION 1..582: note = Synthetic
PGSPAGSPTSTEEGTSESATPESGPGSEPATSGSETPGTSESATPESGPGTSTEPSEGSAPGTSTEPSEGSAPGTSTEPSEGSAPGTSTEPSEGSAPGTSTEPSEGSAPGTSTEPSEGSAPGSPAGSPTSTEEGTSTEPSEGSAPGTSESATPESGPGSEPATSGSETPGTSESATPESGPGSEPATSGSETPGTSESATPESGPGTSTEPSEGSAPGTSESATPESGPGSPAGSPTSTEEGSPAGSPTSTEEGSPAGSPTSTEEGTSESATPESGPGTSTEPSEGSAPGTSESATPESGPGSEPATSGSETPGTSESATPESGPGSEPATSGSETPGTSESATPESGPGTSTEPSEGSAPGSPAGSPTSTEEGTSESATPESGPGSEPATSGSETPGTSESATPESGPGSPAGSPTSTEEGSPAGSPTSTEEGTSTEPSEGSAPGTSESATPESGPGTSESATPESGPGTSESATPESGPGSEPATSGSETPGSEPATSGSETPGSPAGSPTSTEEGTSTEPSEGSAPGTESTPSEGSAPGSEPATSGSETPGTSESATPESGPGTSTEPSEGSAPGEPEA

SEQ ID NO: 228 - protein, 576 aa, synthetic construct
  REGION 1..576: note = Synthetic
TPESGPGTSESATPESGPGSPAGSPTSTEEGTSESATPESGPGSEPATSGSETPGTSESATPESGPGTSTEPSEGSAPGTSTEPSEGSAPGTSTEPSEGSAPGTSTEPSEGSAPGTSTEPSEGSAPGTSTEPSEGSAPGSPAGSPTSTEEGTSTEPSEGSAPGTSESATPESGPGSEPATSGSETPGTSESATPESGPGSEPATSGSETPGTSESATPESGPGTSTEPSEGSAPGTSESATPESGPGSPAGSPTSTEEGSPAGSPTSTEEGSPAGSPTSTEEGTSESATPESGPGTSTEPSEGSAPGTSESATPESGPGSEPATSGSETPGTSESATPESGPGSEPATSGSETPGTSESATPESGPGTSTEPSEGSAPGSPAGSPTSTEEGTSESATPESGPGSEPATSGSETPGTSESATPESGPGSPAGSPTSTEEGSPAGSPTSTEEGTSTEPSEGSAPGTSESATPESGPGTSESATPESGPGTSESATPESGPGSEPATSGSETPGSESATSGSETPGSPAGSPTSTEEGTSTEPSEGSAPGTSTEPSEGSAPGSEPATSGSETPGTSESA

SEQ ID NO: 229 - protein, 576 aa, synthetic construct
  REGION 1..576: note = Synthetic
GTSTEPSEGSAPGTSESATPESGPGSEPATSGSETPGSEPATSGSETPGSPAGSPTSTEEGTSESATPESGPGTSTEPSEGSAPGTSTEPSEGSAPGSPAGSPTSTEEGTSTEPSEGSAPGTSTEPSEGSAPGTSESATPESGPGTSTEPSEGSAPGTSESATPESGPGSEPATSGSETPGTSTEPSEGSAPGTSTEPSEGSAPGTSESATPESGPGTSESATPESGPGSPAGSPTSTEEGTSESATPESGPGSEPATSGSETPGTSESATPESGPGTSTEPSEGSAPGTSTEPSEGSAPGTSTEPSEGSAPGTSTEPSEGSAPGTSTEPSEGSAPGTSTEPSEGSAPGSPAGSPTSTEEGTSTEPSEGSAPGTSESATPESGPGSEPATSGSETPGTSESATPESGPGSEPATSGSETPGTSESATPESGPGTSTEPSEGSAPGTSESASPESGPGSPAGSPTSTEEGSPAGSPTSTEEGSPAGSPTSTEEGTSESATPESGPGTSTEPSEGSAPGTSESATPESGPGSEPATSGSETPGTSESATPESGPGSEPATSGSETPGTSESATPESGP

SEQ ID NO: 230 - protein, 576 aa, synthetic construct
  REGION 1..576: note = Synthetic
GSETPGSPAGSPTSTEEGTSESATPESGPGTSTEPSEGSAPGTSTEPSEGSAPGSPAGSPTSTEEGTSTEPSEGSAPGTSTEPSEGSAPGTSESATPESGPGTSTEPSEGSAPGTSESATPESGPGSEPATSGSETPGTSTEPSEGSAPGTSTEPSEGSAPGTSESATPESGPGTSESATPESGPGSPAGSPTSTEEGTSESATPESGPGSEPATSGSETPGTSESATPESGPGTSTEPSEGSAPGTSTEPSEGSAPGTSTEPSEGSAPGTSTEPSEGSAPGTSTEPSEGSAPGTSTEPSEGSAPGSPAGSPTSTEEGTSTEPSEGSAPGTSESATPESGPGSEPATSGSETPGTSESATPESGPGSEPATSGSETPGTSESATPESGPGTSTEPSEGSAPGTSESATPESGPGSPAGSPTSTEEGSPAGSPTSTEEGSPAGSPTSTEEGTSESATPESGPGTSTEPSEGSAPGTSESATPESGPGSEPATSGSTETGTSESATPESGPGSEPATSGSETPGTSESATPESGPGTSTEPSEGSAPGSPAGSPTSTEEGTSESATPESGPGSEPATS

SEQ ID NO: 231 - protein, 576 aa, synthetic construct
  REGION 1..576: note = Synthetic
EGSAPGTSTEPSEGSAPGTSESATPESGPGTSTEPSEGSAPGTSESATPESGPGSEPATSGSETPGTSTEPSEGSAPGTSTEPSEGSAPGTSESATPESGPGTSESATPESGPGSPAGSPTSTEEGTSESATPESGPGSEPATSGSETPGTSESATPESGPGTSTEPSEGSAPGTSTEPSEGSAPGTSTEPSEGSAPGTSTEPSEGSAPGTSTEPSEGSAPGTSTEPSEGSAPGSPAGSPTSTEEGTSTEPSEGSAPGTSESATPESGPGSEPATSGSETPGTSESATPESGPGSEPATSGSETPGTSESATPESGPGTSTEPSEGSAPGTSESATPESGPGSPAGSPTSTEEGSPAGSPTSTEEGSPAGSPTSTEEGTSESATPESGPGTSTEPSEGSAPGTSESATPESGPGSEPATSGSETPGTSESATPESGPGSEPATSGSETPGTSESASPESGPGTSTEPSEGSAPGSPAGSPTSTEEGTSESATPESGPGSEPATSGSETPGTSESATPESGPGSPAGSPTSTEEGSPAGSPTSTEEGTSTEPSEGSAPGTSESATPESGPGTSESAT

SEQ ID NO: 232 - protein, 294 aa, synthetic construct; identical to SEQ ID NO: 219
  REGION 1..294: note = Synthetic

SEQ ID NO: 233 - protein, 52 aa, synthetic construct
  REGION 1..52: note = Synthetic
YRQSMNNFQGLRSFGCRFGTCTVQKLAHQIYQFTDKDKDNVAPRSKISPQGY

SEQ ID NO: 234 - protein, 37 aa, synthetic construct
  REGION 1..37: note = Synthetic
KCNTATCATQRLANFLVRSSNNLGPVLPPTNVGSNTY

SEQ ID NO: 235 - protein, 37 aa, synthetic construct [sequence omitted]

SEQ ID NO: 236 - protein, 32 aa, synthetic construct
  REGION 1..32: note = Synthetic
CGNLSTCMLGTYTQDFNKFHTFPQTAIGVGAP

SEQ ID NO: 237 - protein, 32 aa, synthetic construct
  REGION 1..32: note = Synthetic
CSNLSTCVLGKLSQELHKLQTYPRTNTGSGTP

SEQ ID NO: 238 - protein, 36 aa, synthetic construct
  REGION 1..36: note = Synthetic
ACDTATCVTHRLAGLLSRSGGVVKNMVPTNVGSKAF

SEQ ID NO: 239 - protein, 37 aa, synthetic construct
  REGION 1..37: note = Synthetic
ACNTATCVTHRLAGLLSRSGGMVKSNFVPTNVGSKAF

SEQ ID NO: 240 - protein, 115 aa, synthetic construct
  REGION 1..115: note = Synthetic
MNSGVCLCVLMAVLAAGALTQPVPPADPAGSGLQRAEEAPRRQLRVSQRTDGESRAHLGALLARYIQQARKAPSGRMSIVKNLQNLDPSHRISDRDYMGWMDFGRRSAEEYEYPS

SEQ ID NO: 241 - protein, 33 aa, synthetic construct
  REGION 1..33: note = Synthetic
KAPSGRMSIVKNLQNLDPSHRISDRDYMGWMDF

SEQ ID NO: 242 - protein, 8 aa, synthetic construct [sequence omitted]

SEQ ID NO: 243 - protein, 39 aa, synthetic construct
  REGION 1..39: note = Synthetic
HSDGTFTSDLSKQMEEEAVRLFIEWLKNGGPSSGAPPPS

SEQ ID NO: 244 - protein, 39 aa, synthetic construct
  REGION 1..39: note = Synthetic
HGEGTFTSDLSKQMEEEAVRLFIEWLKNGGPSSGAPPPS

SEQ ID NO: 245 - protein, 216 aa, synthetic construct
  REGION 1..216: note = Synthetic
MRSGCVVVHVWILAGLWLAVAGRPLAFSDAGPHVHYGWGDPIRLRHLYTSGPHGLSSCFLRIRADGVVDCARGQSAHSLLEIKAVALRTVAIKGVHSVRYLCMGADGKMQGLLQYSEEDCAFEEEIRPDGYNVYRSEKHRLPVSLSSAKQRQLYKNRGFLPLSHFLPMLPMVPEEPEDLRGHLESDMFSSPLETDSMDPFGLVTGLEAVRSPSFEK

SEQ ID NO: 246 - protein, 209 aa, synthetic construct
  REGION 1..209: note = Synthetic
MDSDETGFEHSGLWVSVLAGLLLGACQAHPIPDSSPLLQFGGQVRQRYLYTDDAQQTEAHLEIREDGTVGGAADQSPESLLQLKALKPGVIQILGVKTSRFLCQRPDGALYGSLHFDPEACSFRELLLEDGYNVYQSEAHGLPLHLPGNKSPHRDPAPRGPARFLPLPGLPPALPEPPGILAPQPPDVGSSDPLSMVGPSQGRSPSYAS

SEQ ID NO: 247 - protein, 34 aa, synthetic construct
  REGION 1..34: note = Synthetic
QLGPQGPPHLVADPSKKQGPWLEEEEEAYGWMDF

SEQ ID NO: 248 - protein, 22 aa, synthetic construct
  REGION 1..22: note = Synthetic
DPSKKQGPWLEEEEEAYGWMDF

SEQ ID NO: 249 - protein, 42 aa, synthetic construct
  REGION 1..42: note = Synthetic
YAEGTFISDYSIAMDKIHQQDFVNWLLAQKGKKNDWKHNITQ

SEQ ID NO: 250 - protein, 28 aa, synthetic construct
  REGION 1..28: note = Synthetic
GSSFLSPEHQRVQQRKESKKPPAKLQPR

SEQ ID NO: 251 - protein, 29 aa, synthetic construct
  REGION 1..29: note = Synthetic
HSQGTFTSDYSKYLDSRRAQDFVQWLMNT

SEQ ID NO: 252 - protein, 37 aa, synthetic construct
  REGION 1..37: note = Synthetic
HDEFERHAEGTFTSDVSSTLEGQAALEFIAWLVKGRG

SEQ ID NO: 253 - protein, 30 aa, synthetic construct
  REGION 1..30: note = Synthetic
HAEGTFTSDVSSYLEGQAALEFIAWLVKGR

SEQ ID NO: 254 - protein, 31 aa, synthetic construct
  REGION 1..31: note = Synthetic
HAEGTFTSDVSSTLEGQAALEFIAWLVKGRG

SEQ ID NO: 255 - protein, 37 aa, synthetic construct
  REGION 1..37: note = Synthetic
HAEGTYTNDVTEYLEEKAAKEFIEWLIKGKPKKIRYS

SEQ ID NO: 256 - protein, 33 aa, synthetic construct
  REGION 1..33: note = Synthetic
HADGSFSDEMNTILDNLAARDFINWLIETKITD

SEQ ID NO: 257 - protein, 31 aa, synthetic construct
  REGION 1..31: note = Synthetic
HAEGTFTNDMTNYLEEKAAKEFVGWLIKGRP

SEQ ID NO: 258 - protein, 70 aa, synthetic construct
  REGION 1..70: note = Synthetic
GPETLCGAELVDALQFVCGDRGFYFNKPTGYGSSSRRAPQTGIVDECCFRSCDLRRLEMYCAPLKPAKSA

SEQ ID NO: 259 - protein, 67 aa, synthetic construct
  REGION 1..67: note = Synthetic
AYRPSETLCGGELVDTLQFVCGDRGFYFSRPASRVSRRSRGIVEECCFRSCDLALLETYCATPAKSE

SEQ ID NO: 260 - protein, 149 aa, synthetic construct
  REGION 1..149: note = Synthetic
EESQKKLPSSRITCPQGSVAYGSYCYSLILIPQTWSNAELSCQMHFSGHLAFLLSTGEITFVSSLVKNSLTAYQYIWIGLHDPSHGTLPNGSGWKWSSSNVLTFYNWERNPSIAADRGYCAVLSQKSGFQKWRDFNCENELPYICKFKV

SEQ ID NO: 261 - protein, 47 aa, synthetic construct
  REGION 1..47: note = Synthetic
TQAQLLRVGCVLGTCQVQNLSHRLWQLMGPAGRQDSAPVDPSSPHSY

SEQ ID NO: 262 - protein, 146 aa, synthetic construct
  REGION 1..146: note = Synthetic
VPIQKVQDDTKTLIKTIVTRINDISHTQSVSSKQKVTGLDFIPGLHPILTLSKMDQTLAVYQQILTSMPSRNVIQISNDLENLRDLLHVLAFSKSCHLPWASGLETLDSLGGVLEASGYSTEVVALSRLQGSLQDMLWQLDLSPGC

SEQ ID NO: 263 - protein, 8 aa, synthetic construct
  REGION 1..8: note = Synthetic
YFLFRPRN

SEQ ID NO: 264 - protein, 9 aa, synthetic construct
  REGION 1..9: note = Synthetic
GYFLFRPRN

SEQ ID NO: 265 - protein, 25 aa, synthetic construct
  REGION 1..25: note = Synthetic
FRVDEEFQSPFASQSRGYFLFRPRN

SEQ ID NO: 266 - protein, 25 aa, synthetic construct
  REGION 1..25: note = Synthetic
FKVDEEFQGPIVSQNRRYFLFRPRN

SEQ ID NO: 267 - protein, 33 aa, synthetic construct
  REGION 1..33: note = Synthetic
ILQRGSGTAAVDFTKKDHTATWGRPFFLFRPRN

SEQ ID NO: 268 - protein, 23 aa, synthetic construct
  REGION 1..23: note = Synthetic
YKVNEYQGPVAPSGGFFLFRPRN

SEQ ID NO: 269 - protein, 37 aa, synthetic construct
  REGION 1..37: note = Synthetic
HSQGTFTSDYSKYLDSRRAQDFVQWLMNTKRNRNNIA

SEQ ID NO: 270 - protein, 36 aa, synthetic construct
  REGION 1..36: note = Synthetic
YPIKPEAPGEDASPEELNRYYASLRHYLNLVTRQRY

SEQ ID NO: 271 - protein, 37 aa, synthetic construct
  REGION 1..37: note = Synthetic
KCNTATCATNRLANFLVHSSNNFGPILPPTNVGSNTY

SEQ ID NO: 272 - protein, 40 aa, synthetic construct
  REGION 1..40: note = Synthetic
DNPSLSIDLTFHLLRTLLELARTQSQRERAEQNRIIFDSV

SEQ ID NO: 273 - protein, 41 aa, synthetic construct
  REGION 1..41: note = Synthetic
IVLSLDVPIGLLQILLEQARARAAREQATTNARILARVGHC

SEQ ID NO: 274 - protein, 38 aa, synthetic construct
  REGION 1..38: note = Synthetic
FTLSLDVPTNIMNLLFNIAKAKNLRAQAAANAHLMAQI

SEQ ID NO: 275 - protein, 37 aa, synthetic construct
  REGION 1..37: note = Synthetic
  SITE 10: note = MISC_FEATURE - X is N or Q
  SITE 25: note = MISC_FEATURE - X is S, P, or G
  SITE 28: note = MISC_FEATURE - X is S, P, or G
  SITE 29: note = MISC_FEATURE - X is S, P, or G
KCNTATCATXRLANFLVHSSNNFGXILXXTNVGSNTY

SEQ ID NO: 276 - protein, 37 aa, synthetic construct
  REGION 1..37: note = Synthetic
KCNTATCATNRLANFLVHSSNNFGGILGGTNVGSNTY

SEQ ID NO: 277 - protein, 37 aa, synthetic construct; identical to SEQ ID NO: 255
  REGION 1..37: note = Synthetic

SEQ ID NO: 278 - protein, 37 aa, synthetic construct
  REGION 1..37: note = Synthetic
HAEGTFTSDVTQQLDEKAAKEFIDWLINGGPSKEIIS

SEQ ID NO: 279 - protein, 33 aa, synthetic construct
  REGION 1..33: note = Synthetic
HAEGTYTNDVTEYLEEKAAKEFIIEWLIKGKPK

SEQ ID NO: 280 - protein, 32 aa, synthetic construct
  REGION 1..32: note = Synthetic
HAEGTFTNDMTNYLEEKAAKEFVGWLIKGRPK

SEQ ID NO: 281 - protein, 27 aa, synthetic construct
  REGION 1..27: note = Synthetic
HAEGTFISDYSIAMDKIRQQDFVNWLL

SEQ ID NO: 282 - protein, 27 aa, synthetic construct
  REGION 1..27: note = Synthetic
HAEGTFISDYSIAMDKIRQQDFVNWLL

SEQ ID NO: 283 - protein, 32 aa, synthetic construct
  REGION 1..32: note = Synthetic
HADGTFTNDMTSYLDAKAARDFVSWLARSDKS

SEQ ID NO: 284 - protein, 30 aa, synthetic construct
  REGION 1..30: note = Synthetic
HAEGTYTSDVSSYLQDQAAKEFVSWLKTGR

SEQ ID NO: 285 - protein, 30 aa, synthetic construct; identical to SEQ ID NO: 284
  REGION 1..30: note = Synthetic

SEQ ID NO: 286 - protein, 38 aa, synthetic construct
  REGION 1..38: note = Synthetic
HADGIYTSDVASLTDYLKSKRFVESLSNYNKRQNDRRM

SEQ ID NO: 287 - protein, 31 aa, synthetic construct
  REGION 1..31: note = Synthetic
YADAPYISDVYSYLQDQVAKKWLKSGQDRRE

SEQ ID NO: 288 - protein, 28 aa, synthetic construct
  REGION 1..28: note = Synthetic
HADGTYTSDVSSYLQEQAAKDFITWLKS

SEQ ID NO: 289 - protein, 28 aa, synthetic construct
  REGION 1..28: note = Synthetic
HAEGTYTSDVSSYLQDQAAKEFVSWLKT

SEQ ID NO: 290 - protein, 28 aa, synthetic construct
  REGION 1..28: note = Synthetic
HAEGTFTSDVSSYLEGQAAKEFIAWLVK

SEQ ID NO: 291 - protein, 28 aa, synthetic construct
  REGION 1..28: note = Synthetic
HADGTFTSDVSSYLKDQAIKDFVDRLKA

SEQ ID NO: 292 - protein, 28 aa, synthetic construct
  REGION 1..28: note = Synthetic
HADGIYTSDVASLTDYLKSKRFVESLSN

SEQ ID NO: 293 - protein, 28 aa, synthetic construct
  REGION 1..28: note = Synthetic
HSQGTFTSDYSKYLDSRRAQQFLKWLLN

SEQ ID NO: 294 - protein, 28 aa, synthetic construct
  REGION 1..28: note = Synthetic
HSQGTFTSDYSKHLDSRYAQEFVQWLMN

SEQ ID NO: 295 - protein, 28 aa, synthetic construct
  REGION 1..28: note = Synthetic
HSEGTFSNDYSKYLEDRKAQEFVRWLMN

SEQ ID NO: 296 - protein, 28 aa, synthetic construct
  REGION 1..28: note = Synthetic
HTDGIFSSDYSKYLDNRRTKDFVQWLLS

SEQ ID NO: 297 - protein, 28 aa, synthetic construct
  REGION 1..28: note = Synthetic
HSEGTFSSDYSKYLDSRRAKDFVQWLMS

SEQ ID NO: 298 - protein, 28 aa, synthetic construct
  REGION 1..28: note = Synthetic
YAEGTFISDYSIAMDKIRQQDFVNWLLA

SEQ ID NO: 299 - protein, 28 aa, synthetic construct
  REGION 1..28: note = Synthetic
HADGIFTTVYSHLLAKLAVKRYLHSLIR

SEQ ID NO: 300 - protein, 28 aa, synthetic construct
  REGION 1..28: note = Synthetic
HIDGIFTDSYSRYRKQMAVKKYLAAVLG

SEQ ID NO: 301 - protein, 28 aa, synthetic construct
  REGION 1..28: note = Synthetic
HSDALFTDTYTRLRKQMAMKKYLNSVLN

SEQ ID NO: 302 - protein, 28 aa, synthetic construct
  REGION 1..28: note = Synthetic
HSDAVFTDSYTRLLKQMAMRKYLDSILN

SEQ ID NO: 303 - protein, 28 aa, synthetic construct
  REGION 1..28: note = Synthetic
HSDATFTAEYSKLLAKLALQKYLESILG

SEQ ID NO: 304 - protein, 28 aa, synthetic construct
  REGION 1..28: note = Synthetic
YADAIFTNSYRKVLGQLSARKLLQDIMN

SEQ ID NO: 305 - protein, 28 aa, synthetic construct
  REGION 1..28: note = Synthetic
HADAIFTSSYRRILGQLYARKLLHEIMN

SEQ ID NO: 306 - protein, 28 aa, synthetic construct
  REGION 1..28: note = Synthetic
HVDAIFTTNYRKLLSQLYARKVIQDIMN

SEQ ID NO: 307 - protein, 28 aa, synthetic construct
  REGION 1..28: note = Synthetic
VAHGILNEAYRKVLDQLSAGKHLQSLVA

SEQ ID NO: 308 - protein, 28 aa, synthetic construct
  REGION 1..28: note = Synthetic
VAHGILDKAYRKVLDQLSARRYLQTLMA

SEQ ID NO: 309 - protein, 28 aa, synthetic construct
  REGION 1..28: note = Synthetic
HADGMFNKAYRKALGQLSARKYLHSLMA

SEQ ID NO: 310 - protein, 28 aa, synthetic construct
  REGION 1..28: note = Synthetic
HADGSFSDEMNTVLDSLATRDFINWLLQ

SEQ ID NO: 311 - protein, 27 aa, synthetic construct
  REGION 1..27: note = Synthetic
HSDGTFTSELSRLRESARLQRLLQGLV

SEQ ID NO: 312 - protein, 27 aa, synthetic construct
  REGION 1..27: note = Synthetic
HSDGLFTSEYSKMRGNAQVQKFIQNLM

SEQ ID NO: 313 - protein, 28 aa, synthetic construct
  REGION 1..28: note = Synthetic
HSDGTFTSDLSKQMEEEAVRLFIEWLKN

SEQ ID NO: 314 - protein, 31 aa, synthetic construct
  REGION 1..31: note = Synthetic
HAEGTFTSDVSSYLEGQAAREFIAWLVKGRG

SEQ ID NO: 315 - protein, 31 aa, synthetic construct
  REGION 1..31: note = Synthetic
HAEGTFTSDVSSYLEGQAAKEFIAWLVRGRG

SEQ ID NO: 316 - protein, 31 aa, synthetic construct
  REGION 1..31: note = Synthetic
HAEGTFTSDVSSYLEGQAAKEFIAWLVKGKG

SEQ ID NO: 317 - protein, 31 aa, synthetic construct
  REGION 1..31: note = Synthetic
HAEGTFTSDVSSYLEGQAAREFIAWLVRGKG

SEQ ID NO: 318 - protein, 32 aa, synthetic construct
  REGION 1..32: note = Synthetic
HAEGTFTSDVSSYLEGQAAREFIAWLVRGKGR

SEQ ID NO: 319 - protein, 33 aa, synthetic construct
  REGION 1..33: note = Synthetic
HAEGTFTSDVSSYLEGQAAREFIAWLVRGRGRK

SEQ ID NO: 320 - protein, 34 aa, synthetic construct
  REGION 1..34: note = Synthetic
HAEGTFTSDVSSYLEGQAAREFIAWLVRGRGRRK

SEQ ID NO: 321 - protein, 31 aa, synthetic construct
  REGION 1..31: note = Synthetic
HAEGTFTSDVSSYLEGQAAREFIAWLVKGKG

SEQ ID NO: 322 - protein, 31 aa, synthetic construct
  REGION 1..31: note = Synthetic
HAEGTFTSDVSSYLEGQAAKEFIAWLVRGKG

SEQ ID NO: 323 - protein, 33 aa, synthetic construct
  REGION 1..33: note = Synthetic
HAEGTFTSDVSSYLEGQAAREFIAWLVKGRGRK

SEQ ID NO: 324 - protein, 34 aa, synthetic construct
  REGION 1..34: note = Synthetic
HAEGTFTSDVSSYLEGQAAKEFIAWLVRGRGRRK

SEQ ID NO: 325 - protein, 33 aa, synthetic construct
  REGION 1..33: note = Synthetic
HAEGTFTSDVSSYLEGQAAREFIAWLVRGKGRK

SEQ ID NO: 326 - protein, 34 aa, synthetic construct
  REGION 1..34: note = Synthetic
HAEGTFTSDVSSYLEGQAAREFIAWLVRGKGRRK

SEQ ID NO: 327 - protein, 31 aa, synthetic construct
  REGION 1..31: note = Synthetic
HGEGTFTSDVSSYLEGQAAREFIAWLVKGRG

SEQ ID NO: 328 - protein, 31 aa, synthetic construct
  REGION 1..31: note = Synthetic
HGEGTFTSDVSSYLEGQAAKEFIAWLVRGRG

SEQ ID NO: 329 - protein, 31 aa, synthetic construct
  REGION 1..31: note = Synthetic
HGEGTFTSDVSSYLEGQAAKEFIAWLVKGKG

SEQ ID NO: 330 - protein, 31 aa, synthetic construct
  REGION 1..31: note = Synthetic
HGEGTFTSDVSSYLEGQAAREFIAWLVRGKG

SEQ ID NO: 331 - protein, 33 aa, synthetic construct
  REGION 1..33: note = Synthetic
HGEGTFTSDVSSYLEGQAAREFIAWLVRGRGRK

SEQ ID NO: 332 - protein, 34 aa, synthetic construct
  REGION 1..34: note = Synthetic
HGEGTFTSDVSSYLEGQAAREFIAWLVRGRGRRK

SEQ ID NO: 333 - protein, 31 aa, synthetic construct
  REGION 1..31: note = Synthetic
HGEGTFTSDVSSYLEGQAAREFIAWLVKGKG

SEQ ID NO: 334 - protein, 31 aa, synthetic construct
  REGION 1..31: note = Synthetic
HGEGTFTSDVSSYLEGQAAKEFIAWLVRGKG

SEQ ID NO: 335 - protein, 33 aa, synthetic construct
  REGION 1..33: note = Synthetic
HGEGTFTSDVSSYLEGQAAREFIAWLVKGRGRK

SEQ ID NO: 336 - protein, 34 aa, synthetic construct
  REGION 1..34: note = Synthetic
HGEGTFTSDVSSYLEGQAAKEFIAWLVRGRGRRK

SEQ ID NO: 337 - protein, 33 aa, synthetic construct
  REGION 1..33: note = Synthetic
HGEGTFTSDVSSYLEGQAAREFIAWLVRGKGRK

SEQ ID NO: 338 - protein, 34 aa, synthetic construct
  REGION 1..34: note = Synthetic
HGEGTFTSDVSSYLEGQAAREFIAWLVRGKGRRK

SEQ ID NO: 339 - protein, 32 aa, synthetic construct
  REGION 1..32: note = Synthetic
HAEGTFTSDVSSYLEGQAAREFIAWLVRGRGK

SEQ ID NO: 340 - protein, 33 aa, synthetic construct; identical to SEQ ID NO: 319
  REGION 1..33: note = Synthetic

SEQ ID NO: 341 - protein, 34 aa, synthetic construct; identical to SEQ ID NO: 320
  REGION 1..34: note = Synthetic

SEQ ID NO: 342 - protein, 35 aa, synthetic construct
  REGION 1..35: note = Synthetic
HAEGTFTSDVSSYLEGQAAREFIAWLVRGRGRREK

SEQ ID NO: 343 - protein, 36 aa, synthetic construct
  REGION 1..36: note = Synthetic
HAEGTFTSDVSSYLEGQAAREFIAWLVRGRGRREFK

SEQ ID NO: 344 - protein, 37 aa, synthetic construct
  REGION 1..37: note = Synthetic
HAEGTFTSDVSSYLEGQAAREFIAWLVRGRGRREFPK

SEQ ID NO: 345 - protein, 38 aa, synthetic construct
  REGION 1..38: note = Synthetic
HAEGTFTSDVSSYLEGQAAREFIAWLVRGRGRREFPEK

SEQ ID NO: 346 - protein, 39 aa, synthetic construct
  REGION 1..39: note = Synthetic
HAEGTFTSDVSSYLEGQAAREFIAWLVRGRGRREFPEEK

SEQ ID NO: 347 - protein, 38 aa, synthetic construct
  REGION 1..38: note = Synthetic
HDEFERHAEGTFTSDVSSYLEGQAAREFIAWLVRGRGK

SEQ ID NO: 348 - protein, 39 aa, synthetic construct
  REGION 1..39: note = Synthetic
HDEFERHAEGTFTSDVSSYLEGQAAREFIAWLVRGRGRK

SEQ ID NO: 349 - protein, 40 aa, synthetic construct
  REGION 1..40: note = Synthetic
HDEFERHAEGTFTSDVSSYLEGQAAREFIAWLVRGRGRRK

SEQ ID NO: 350 - protein, 41 aa, synthetic construct
  REGION 1..41: note = Synthetic
HDEFERHAEGTFTSDVSSYLEGQAAREFIAWLVRGRGRREK

SEQ ID NO: 351 - protein, 42 aa, synthetic construct
  REGION 1..42: note = Synthetic
HDEFERHAEGTFTSDVSSYLEGQAAREFIAWLVRGRGRREFK

SEQ ID NO: 352 - protein, 43 aa, synthetic construct
  REGION 1..43: note = Synthetic
HDEFERHAEGTFTSDVSSYLEGQAAREFIAWLVRGRGRREFPK

SEQ ID NO: 353 - protein, 44 aa, synthetic construct
  REGION 1..44: note = Synthetic
HDEFERHAEGTFTSDVSSYLEGQAAREFIAWLVRGRGRREFPEK

SEQ ID NO: 354 - protein, 45 aa, synthetic construct
  REGION 1..45: note = Synthetic
HDEFERHAEGTFTSDVSSYLEGQAAREFIAWLVRGRGRREFPEEK

SEQ ID NO: 355 - protein, 38 aa, synthetic construct
  REGION 1..38: note = Synthetic
DEFERHAEGTFTSDVSSYLEGQAAREFIAWLVRGRGRK

SEQ ID NO: 356 - protein, 39 aa, synthetic construct
  REGION 1..39: note = Synthetic
DEFERHAEGTFTSDVSSYLEGQAAREFIAWLVRGRGRRK

SEQ ID NO: 357 - protein, 40 aa, synthetic construct
  REGION 1..40: note = Synthetic
DEFERHAEGTFTSDVSSYLEGQAAREFIAWLVRGRGRREK

SEQ ID NO: 358 - protein, 41 aa, synthetic construct
  REGION 1..41: note = Synthetic
DEFERHAEGTFTSDVSSYLEGQAAREFIAWLVRGRGRREFK

SEQ ID NO: 359 - protein, 42 aa, synthetic construct
  REGION 1..42: note = Synthetic
DEFERHAEGTFTSDVSSYLEGQAAREFIAWLVRGRGRREFPK

SEQ ID NO: 360 - protein, 43 aa, synthetic construct
  REGION 1..43: note = Synthetic
DEFERHAEGTFTSDVSSYLEGQAAREFIAWLVRGRGRREFPEK

SEQ ID NO: 361 - protein, 44 aa, synthetic construct
  REGION 1..44: note = Synthetic
DEFERHAEGTFTSDVSSYLEGQAAREFIAWLVRGRGRREFPEEK

SEQ ID NO: 362 - protein, 36 aa, synthetic construct
  REGION 1..36: note = Synthetic
EFERHAEGTFTSDVSSYLEGQAAREFIAWLVRGRGK

SEQ ID NO: 363 - protein, 37 aa, synthetic construct
  REGION 1..37: note = Synthetic
EFERHAEGTFTSDVSSYLEGQAAREFIAWLVRGRGRK

SEQ ID NO: 364 - protein, 38 aa, synthetic construct
  REGION 1..38: note = Synthetic
EFERHAEGTFTSDVSSYLEGQAAREFIAWLVRGRGRRK

SEQ ID NO: 365 - protein, 39 aa, synthetic construct
  REGION 1..39: note = Synthetic
EFERHAEGTFTSDVSSYLEGQAAREFIAWLVRGRGRREK

SEQ ID NO: 366 - protein, 40 aa, synthetic construct
  REGION 1..40: note = Synthetic
EFERHAEGTFTSDVSSYLEGQAAREFIAWLVRGRGRREFK

SEQ ID NO: 367 - protein, 41 aa, synthetic construct
  REGION 1..41: note = Synthetic
EFERHAEGTFTSDVSSYLEGQAAREFIAWLVRGRGRREFPK

SEQ ID NO: 368 - protein, 42 aa, synthetic construct
  REGION 1..42: note = Synthetic
EFERHAEGTFTSDVSSYLEGQAAREFIAWLVRGRGRREFPEK

SEQ ID NO: 369 - protein, 43 aa, synthetic construct
  REGION 1..43: note = Synthetic
EFERHAEGTFTSDVSSYLEGQAAREFIAWLVRGRGRREFPEEK

SEQ ID NO: 370 - protein, 35 aa, synthetic construct
  REGION 1..35: note = Synthetic
FERHAEGTFTSDVSSYLEGQAAREFIAWLVRGRGK

SEQ ID NO: 371 - protein, 36 aa, synthetic construct
  REGION 1..36: note = Synthetic
FERHAEGTFTSDVSSYLEGQAAREFIAWLVRGRGRK

SEQ ID NO: 372 - protein, 37 aa, synthetic construct
  REGION 1..37: note = Synthetic
FERHAEGTFTSDVSSYLEGQAAREFIAWLVRGRGRRK

SEQ ID NO: 373 - protein, 38 aa, synthetic construct
  REGION 1..38: note = Synthetic
FERHAEGTFTSDVSSYLEGQAAREFIAWLVRGRGRREK

SEQ ID NO: 374 - protein, 39 aa, synthetic construct
  REGION 1..39: note = Synthetic
FERHAEGTFTSDVSSYLEGQAAREFIAWLVRGRGRREFK

SEQ ID NO: 375 - protein, 40 aa, synthetic construct
  REGION 1..40: note = Synthetic
FERHAEGTFTSDVSSYLEGQAAREFIAWLVRGRGRREFPK

SEQ ID NO: 376 - protein, 41 aa, synthetic construct
  REGION 1..41: note = Synthetic
FERHAEGTFTSDVSSYLEGQAAREFIAWLVRGRGRREFPEK

SEQ ID NO: 377 - protein, 42 aa, synthetic construct
  REGION 1..42: note = Synthetic
FERHAEGTFTSDVSSYLEGQAAREFIAWLVRGRGRREFPEEK

SEQ ID NO: 378 - protein, 34 aa, synthetic construct
  REGION 1..34: note = Synthetic
ERHAEGTFTSDVSSYLEGQAAREFIAWLVRGRGK

SEQ ID NO: 379 - protein, 35 aa, synthetic construct
  REGION 1..35: note = Synthetic
ERHAEGTFTSDVSSYLEGQAAREFIAWLVRGRGRK

SEQ ID NO: 380 - protein, 36 aa, synthetic construct
  REGION 1..36: note = Synthetic
ERHAEGTFTSDVSSYLEGQAAREFIAWLVRGRGRRK

SEQ ID NO: 381 - protein, 37 aa, synthetic construct
  REGION 1..37: note = Synthetic
ERHAEGTFTSDVSSYLEGQAAREFIAWLVRGRGRREK

SEQ ID NO: 382 - protein, 38 aa, synthetic construct
  REGION 1..38: note = Synthetic
ERHAEGTFTSDVSSYLEGQAAREFIAWLVRGRGRREFK

SEQ ID NO: 383 - protein, 39 aa, synthetic construct
  REGION 1..39: note = Synthetic
ERHAEGTFTSDVSSYLEGQAAREFIAWLVRGRGRREFPK

SEQ ID NO: 384 - protein, 40 aa, synthetic construct
  REGION 1..40: note = Synthetic
ERHAEGTFTSDVSSYLEGQAAREFIAWLVRGRGRREFPEK

SEQ ID NO: 385 - protein, 41 aa, synthetic construct
  REGION 1..41: note = Synthetic
ERHAEGTFTSDVSSYLEGQAAREFIAWLVRGRGRREFPEEK

SEQ ID NO: 386 - protein, 33 aa, synthetic construct
  REGION 1..33: note = Synthetic
RHAEGTFTSDVSSYLEGQAAREFIAWLVRGRGK

SEQ ID NO: 387 - protein, 34 aa, synthetic construct
  REGION 1..34: note = Synthetic
RHAEGTFTSDVSSYLEGQAAREFIAWLVRGRGRK

SEQ ID NO: 388 - protein, 35 aa, synthetic construct
  REGION 1..35: note = Synthetic
RHAEGTFTSDVSSYLEGQAAREFIAWLVRGRGRRK

SEQ ID NO: 389 - protein, 36 aa, synthetic construct
  REGION 1..36: note = Synthetic
RHAEGTFTSDVSSYLEGQAAREFIAWLVRGRGRREK

SEQ ID NO: 390 - protein, 37 aa, synthetic construct
  REGION 1..37: note = Synthetic
RHAEGTFTSDVSSYLEGQAAREFIAWLVRGRGRREFK

SEQ ID NO: 391 - protein, 38 aa, synthetic construct
  REGION 1..38: note = Synthetic
RHAEGTFTSDVSSYLEGQAAREFIAWLVRGRGRREFPK

SEQ ID NO: 392 - protein, 39 aa, synthetic construct
  REGION 1..39: note = Synthetic
RHAEGTFTSDVSSYLEGQAAREFIAWLVRGRGRREFPEK

SEQ ID NO: 393 - protein, 40 aa, synthetic construct
  REGION 1..40: note = Synthetic
RHAEGTFTSDVSSYLEGQAAREFIAWLVRGRGRREFPEEK

SEQ ID NO: 394 - protein, 38 aa, synthetic construct
  REGION 1..38: note = Synthetic
HDEFERHAEGTFTSDVSSYLEGQAAREFIAWLVKGRGK

SEQ ID NO: 395 - protein, 38 aa, synthetic construct
  REGION 1..38: note = Synthetic
HDEFERHAEGTFTSDVSSYLEGQAAKEFIAWLVRGRGK

SEQ ID NO: 396 - protein, 38 aa, synthetic construct
  REGION 1..38: note = Synthetic
HDEFERHAEGTFTSDVSSYLEGQAAREFIAWLVRGKGK

SEQ ID NO: 397 - protein, 32 aa, synthetic construct
  REGION 1..32: note = Synthetic
HAEGTFTSDVSSYLEGQAAREFIAWLVKGRGK

SEQ ID NO: 398 - protein, 32 aa, synthetic construct
  REGION 1..32: note = Synthetic
HAEGTFTSDVSSYLEGQAAKEFIAWLVRGRGK

SEQ ID NO: 399 - protein, 32 aa, synthetic construct
  REGION 1..32: note = Synthetic
HAEGTFTSDVSSYLEGQAAREFIAWLVRGKGK

SEQ ID NO: 400 - protein, 32 aa, synthetic construct; identical to SEQ ID NO: 339
  REGION 1..32: note = Synthetic

SEQ ID NO: 401 - protein, 39 aa, synthetic construct
  REGION 1..39: note = Synthetic
HDEFERHAEGTFTSDVSSYLEGQAAREFIAWLVKGRGRK

SEQ ID NO: 402 - protein, 39 aa, synthetic construct
  REGION 1..39: note = Synthetic
HDEFERHAEGTFTSDVSSYLEGQAAKEFIAWLVRGRGRK

SEQ ID NO: 403 - protein, 39 aa, synthetic construct
  REGION 1..39: note = Synthetic
HDEFERHAEGTFTSDVSSYLEGQAAREFIAWLVRGKGRK

SEQ ID NO: 404 - protein, 33 aa, synthetic construct; identical to SEQ ID NO: 323
  REGION 1..33: note = Synthetic

SEQ ID NO: 405 - protein, 33 aa, synthetic construct
  REGION 1..33: note = Synthetic
HAEGTFTSDVSSYLEGQAAKEFIAWLVRGRGRK

SEQ ID NO: 406 - protein, 33 aa, synthetic construct; identical to SEQ ID NO: 325
  REGION 1..33: note = Synthetic

SEQ ID NO: 407 - protein, 32 aa, synthetic construct
  REGION 1..32: note = Synthetic
HGEGTFTSDVSSYLEGQAAREFIAWLVKGRGK

SEQ ID NO: 408 - protein, 32 aa, synthetic construct
  REGION 1..32: note = Synthetic
HGEGTFTSDVSSYLEGQAAREFIAWLVRGKGK

SEQ ID NO: 409 - protein, 38 aa, synthetic construct
  REGION 1..38: note = Synthetic
FLFHYSKTQKLGKSNVVEELQSPFASQSRGYFLFRPRN

SEQ ID NO: 410 - protein, 177 aa, synthetic construct
  REGION 1..177: note = Synthetic
MEICRGLRSHLITLLLFLFHSETICRPSGRKSSKMQAFRIWDVNQKTFYLRNNQLVAGYLQGPNVNLEEKIDVVPIEPHALFLGIHGGKMCLSCVKSGDETRLQLEAVNITDLSENRKQDKRFAFIRSDSGPTTSFESAACPGWFLCTAMEADQPVSLTNMPDEGVMVTKFYFQEDE

SEQ ID NO: 411 - protein, 175 aa, synthetic construct
  REGION 1..175: note = Synthetic
METCRCPLSYLISFLLFLPHSETACRLGKRPCRMQAFRIWDVNQKTFYLRNNQLVAGYLQGSNTKLEEKLDVVPVEPHAVFLGIHGGKLCLACVKSGDETRLQLEAVNITDLSKNKDQDKRFTFILSDSGPTTSFESAACPGWFLCTALEADRPVSLTNRPEEAMMVTKFYFQKE

SEQ ID NO: 412 - protein, 176 aa, synthetic construct
  REGION 1..176: note = Synthetic
MRPSRSTRRHLISLLLFLFHSETACRPSGKRPCRMQAFRIWDVNQKTFYLRNNQLVAGYLQGPNAKLEERIDVVPLEPQLLFLGIQRGKLCLSCVKSGDKMKLHLEAVNITDLGKNKEQDKRFTFIRSNSGPTTTFESASCPGWFLCTALEADQPVSLTNTPDDSIVVTKFYFQED

SEQ ID NO: 413 - protein, 178 aa, synthetic construct
  REGION 1..178: note = Synthetic
MEICRGPYSHLISLLLILLFRSESAGHIPAGKRPCKMQAFRIWDTNQKTFYLRNNQLIAGYLQGPNTKLEEKIDMVPIDFRNVFLGIHGGKLCLSCVKSGDDTKLQLEEVNITDLNKNKEEDKRFTFIRSETGPTTSFESLACPGWFLCTTLEADHPVSLTNTPKEPCTVTKFYFQED

SEQ ID NO: 414 - protein, 178 aa, synthetic construct
  REGION 1..178: note = Synthetic
MEICWGPYSHLISLLLILLFHSEAACRPSGKRPCKMQAFRIWDTNQKTFYLRNNQLIAGYLQGPNIKLEEKIDMVPIDLHSVFLGIHGGKLCLSCAKSGDDIKLQLEEVNITDLSKNKEEDKRFTFIRSEKGPTTSFESAACPGWFLCTTLEADRPVSLTNTPEEPLIVTKFYFQEDQ

SEQ ID NO: 415 - protein, 153 aa, synthetic construct
  REGION 1..153: note = Synthetic
MRPSGRKSSKMQAFRIWDVNQKTFYLRNNQLVAGYLQGPNVNLEEKIDVVPIEPHALFLGIHGGKMCLSCVKSGDETRLQLEAVNITDLSENRKQDKRFAFIRSDSGPTTSFESAACPGWFLCTAMEADQPVSLTNMPDEGVMVTKFYFQEDE

SEQ ID NO: 416 - protein, 28 aa, synthetic construct
  REGION 1..28: note = Synthetic
SLRRSSCFGGRMDRIGAQSGLGCNSFRY

SEQ ID NO: 417 - protein, 32 aa, synthetic construct
  REGION 1..32: note = Synthetic
SPKMVQGSGGFGRKMDRISSSSGLGCKVLRRH

SEQ ID NO: 418 - protein, 32 aa, synthetic construct
  REGION 1..32: note = Synthetic
NSKMAHSSSCFGQKIDRIGAVSRLGCDGLRLF

SEQ ID NO: 419 - protein, 22 aa, synthetic construct
  REGION 1..22: note = Synthetic
GLSKGCFGLKLDRIGSMSGLGC

SEQ ID NO: 420 - protein, 146 aa, synthetic construct
  REGION 1..146: note = Synthetic
PALPEDGGSGAFPPGHFKDPKRLYCKNGGFFLRIHPDGRVDGVREKSDPHIKLQLQAEERGVVSIKGVCANRYLAMKEDGRLLASKCVTDECFFFERLESNNYNTYRSRKYTSWYVALKRTGQYKLGSKTGPGQKAILFLPMSAKS

SEQ ID NO: 421 - protein, 235 aa, synthetic construct
  REGION 1..235: note = Synthetic
LPAQVAFTPYAPEPGSTCRLREYYDQTAQMCCSKCSPGQHAKVFCTKTSDTVCDSCEDSTYTQLWNWVPECLSCGSRCSSDQVETQACTREQNRICTCRPGWYCALSKQEGCRLCAPLRKCRPGFGVARPGTETSDVVCKPCAPGTFSNTTSSTDICRPHQICNVVAIPGNASMDAVCTSTSPTRSMAPGAVHLPQPVSTRSQHTQPTPEPSTAPSTSFLLPMGPSPPAEGSTGD

SEQ ID NO: 422 - protein, 191 aa, synthetic construct [sequence omitted]

SEQ ID NO: 423 - protein, 190 aa, synthetic construct
  REGION 1..190: note = Synthetic
FPAMPLSSLFANAVLRAQHLHQLAADTYKEFERAYIPEGQRYSIQNAQAAFCFSETIPAPTGKDEAQQRSDVELLRFSLLLIQSWLGPVQFLSRVFTNSLVFGTSDRVYEKLKDLEEGIQALMRELEDGSPRAGQILKQTYDKFDTNLRSDDALLKNYGLLSCFKKDLHKAETYLRVMKCRRFVESSCAF

SEQ ID NO: 424 - protein, 190 aa, synthetic construct
  REGION 1..190: note = Synthetic
FPAMPLSSLFANAVLRAQHLHQLAADTYKEFERTYIPEGQRYSIQNAQAAFCFSETIPAPTGKDEAQQRSDVELLRFSLLLIQSWLGPVQFLSRVFTNSLVFGTSDRVYEKLKDLEEGIQALMRELEDGSPRAGQILRQTYDKFDTNLRSDDALLKNYGLLSCFKKDLHKAETYLRVMKCRRFVESSCAF

SEQ ID NO: 425 - protein, 190 aa, synthetic construct; identical to SEQ ID NO: 424
  REGION 1..190: note = Synthetic

SEQ ID NO: 426 - protein, 190 aa, synthetic construct
  REGION 1..190: note = Synthetic
FPAMPLSSLFANAVLRAQHLHQLAADTYKEFERAYIPEGQRYSIQNAQAAFCFSETIPAPTGKDEAQQRSDMELLRFSLLLIQSWLGPVQLLSRVFTNSLVFGTSDRVYEKLRDLEEGIQALMRELEDGSPRAGQILKQTYDKFDTNLRSDDALLKNYGLLSCFKKDLHKAETYLRVMKCRRFVESSCAF

SEQ ID NO: 427 - protein, 190 aa, synthetic construct
  REGION 1..190: note = Synthetic
FPAMPLSSLFANAVLRAQHLHQLAADTYKEFERAYIPEGQRYSIQNAQAAFCFSETIPAPTGKDEAQQRSDVELLRFSLLLIQSWLGPVQFLSRVFTNSLVFGTSDRVYEKLKDLEEGIQALMRELEDGSPRPGQVLKQTYDKFDTNMRSDDALLKNYGLLSCFKKDLHKAETYLRVMKCRRFVESSCAF

SEQ ID NO: 428 - protein, 190 aa, synthetic construct
  REGION 1..190: note = Synthetic
FPAMPLSSLFANAVLRAQHLHQLAADTYKEFERAYIPEGQRYSIQNAQAAFCFSETIPAPTGKDEAQQRSDVELLRFSLVLIQSWLGPLQFLSRVFTNSLVFGTSDRVYEKLKDLEEGIQALMRELEDGSPRAGQILKQTYDKFDTNLRSDDALLKNYGLLSCFKKDLHKAETYLRVMKCRRFVESSCAF

SEQ ID NO: 429 - protein, 190 aa, synthetic construct; identical to SEQ ID NO: 423
  REGION 1..190: note = Synthetic

SEQ ID NO: 430 - protein, 190 aa, synthetic construct
  REGION 1..190: note = Synthetic
FPAMPLSSLFANAVLRAQHLHQLAADTYKEFERAYIPEGQRYSIQNAQAAFCFSETIPAPTGKDEAQQRSDVELLRFSLLLIQSWLGPVQFLSRVFTNSLVFGTSDRVYEKLKDLEEGIQALMRELEDGSPRGGQILKQTYDKFDTNLRSDDALLKNYGLLSCFKKDLHKAETYLRVMKCRRFVESSCAF

SEQ ID NO: 431 - protein, 190 aa, synthetic construct
  REGION 1..190: note = Synthetic
FPAMPLSSLFANAVLRAQHLHQLAADTYKDFERAYIPEGQRYSIQNAQAAFCFSETIPAPTGKDEAQQRSDMELLRFSLLLIQSWLGPVQFLSRVFTNSLVFGTSDRVYEKLKDLEEGIQALMRELEDGSPRAGPILKQTYDKFDTNLRSDDALLKNYGLLSCFKKDLHKAETYLRVMKCRRFVESSCAF

SEQ ID NO: 432 - protein, 190 aa, synthetic construct
  REGION 1..190: note = Synthetic
FPAMPLSSLFANAVLRAQHLHQLAADTYKEFERAYIPEGQRYSIQNAQAAFCFSETIPAPTGKDEAQQRSDVELLRFSLLLIQSWLGPVQFLSRVFTNSLVFGTSDRVYEKLKDLEEGIQALMRELEDGSPRAGQILKQTYDKFDTNMRSDDALLKNYGLLSCFKKDLHKAETYLRVMKCRRFVESSCAF

SEQ ID NO: 433 - protein, 190 aa, synthetic construct
  REGION 1..190: note = Synthetic
FPAMPLSSLFANAVLRAQHLHQLAADTYKEFERAYIPEGQRYSIQNTQAAFCFSETIPAPTGKDEAQQRSDVELLRFSLLLIQSWLGPVQFLSRVFTNSLVFGTSDRVYEKLKDLEEGIQALMRELEDGSPRAGQILKQTYDKFDTNMRSDDALLKNYGLLSCFKKDLHKAETYLRVMKCRRFVESSCAF

SEQ ID NO: 434 - protein, 190 aa, synthetic construct; identical to SEQ ID NO: 433
  REGION 1..190: note = Synthetic

SEQ ID NO: 435 - protein, 190 aa, synthetic construct
  REGION 1..190: note = Synthetic
FPAMPLSSLFANAVLRAQHLHQLAADTYKEFERAYIPEGQRYSIQNAQAAFCFSETIPAPTGKDEAQQRSDMELLRFSLLLIQSWLGPVQFLSRAFTNTLVFGTSDRVYEKLKDLEEGIQALMRELEDGSPRVGQLLKQTYDKFDTNLRGDDALLKNYGLLSCFKKDLHKAETYLRVMKCRRFVESSCVF

SEQ ID NO: 436 - protein, 190 aa, synthetic construct
  REGION 1..190: note = Synthetic
FPAMPLSSLFANAVLRAQHLHQLAADTYKEFERAYIPEGQRYSIQNAQAAFCFSETIPAPTGKEEAQQRTDMELLRFSLLLIQSWLGPVQFLSRIFTNSLMFGTSDRVYEKLKDLEEGIQALMQELEDGSPRIGQILKQTYDKFDANMRSDDALLKNYGLLSCFKKDLHKAETYLRVMKCRRFAESSCAF

SEQ ID NO: 437 - protein, 190 aa, synthetic construct
  REGION 1..190: note = Synthetic
FPAMPLSSLFSNAVLRAQHLHQLAADTYKEFERAYIPEGQRYSIQNAQAAFCFSETIPAPTGKEEAQQRTDMELLRFSLLLIQSWLGPVQFLSRIFTNSLMFGTSDRVYEKLKDLEEGIQALMQELEDGSPRVGQILKQTYDKFDANMRSDDALLKNYGLLSCFKKDLHKAETYLRVMKCRRFVESSCAF

SEQ ID NO: 438 - protein, 190 aa, synthetic construct
  REGION 1..190: note = Synthetic
FPAMPLSSLFANAVLRAQHLHQLAADTYKEFERAYIPEGQRYSIQNAQTAFCFSETIPAPTGKEEAQQRSDMELLRFSLLLIQSWLGPVQFLSRIFTNSLMFGTSDRVYEKLKDLEEGIQALMQELEDGSPRVGQILKQTYDKFDTNMRSDDALLKNYGLLSCFKKDLHKAETYLRVMKCRRFVESSCAF

SEQ ID NO: 439 - protein, 190 aa, synthetic construct
  REGION 1..190: note = Synthetic
FPAMPLSNLFANAVLRAQHLHQLAADTYKEFERAYIPEGQRYSIQNAQAAFCFSETIPAPTGKEEAQQRSDMELLRFSLLLIQSWLGPVQFLSRVFTNSLVFGTSDRVFEKLKDLEEGIQALMRELEDGSLRAGQLLKQTYDKFDTNMRSDDALLKNYGLLSCFKKDLHKAETYLRVMKCRRFVESSCAF

SEQ ID NO: 440 - protein, 190 aa, synthetic construct
  REGION 1..190: note = Synthetic
FPAMPLSSLFGNAVLRAQHLHQLAADTYKEFERTYIPEGQRYSIHNTQTAFCFSETIPAPTDKEEAQQRSDVELLHFSLLLIQSWLGPVQFLSRVFTNSLVFGTSDRVYEKLKDLEEGIQALMRELEDGTPRAGQILKQTYDKFDTNLRSNDALLKNYGLLSCFRKDLHRTETYLRVMKCRRFVESSCAF

SEQ ID NO: 441 - protein, 191 aa, synthetic construct
  REGION 1..191: note = Synthetic
AFPAMSLSGLFANAVLRAQHLHQLAADTFKEFERTYIPEGQRYSIQNTQVAFCFSETIPAPTGKNEAQQKSDLELLRISLLLIQSWLGPLQFLSRVFTNSLVFGTSDRVYEKLKDLEEGILALMRELEDGTPRAGQILKQTYDKFDTNMRSDDALLKNYGLLSCFRKDLHKTETYLRVMKCRRFGEASCAF

SEQ ID NO: 442 - protein, 191 aa, synthetic construct
  REGION 1..191: note = Synthetic
AFPAMSLSGLFANAVLRAQHLHQLAADTFKEFERTYIPEGQRYSIQNTQVAFCFSETIPAPTGKNEAQQKSDLELLRISLLLIQSWLGPLQFLSRVFTNSLVFGTSDRVYEKLKDLEEGILALMRELEDVTPRAGQILKQTYDKFDTNMRSDDALLKNYGLLSCFRKDLHKTETYLRVMKCRRFGEASCAF

SEQ ID NO: 443 - protein, 190 aa, synthetic construct
  REGION 1..190: note = Synthetic
FPAMSLSGLFANAVLRAQHLHQLAADTFKEFERTYIPEGQRYSIQNTQVAFCFSETIPAPTGKNEAQQKSDLELLRISLLLIQSWLGPLQFLSRVFTNSLVFGTSDRVYEKLKDLEEGILALMRELEDGTPRAGQILKQTYDKFDTNMRSDDALLKNYGLLSCFRKDLHKTETYLRVMKCRRFGEASCAF

SEQ ID NO: 444 - protein, 191 aa, synthetic construct
  REGION 1..191: note = Synthetic
AFPAMSLSGLFANAVLRAQHLHQLAADTFKEFERTYIPEGQRYSIQNTQVAFCFSETIPAPTGKNEAQQKSDLELLRISLLLIQSWLGPLQFLSRVFSNSLVFGTSDRVYEKLKDLEEGILALMRELEDGTPRAGQILKQTYDKFDTNMRSDDALLKNYGLLSCFRKDLHKTETYLRVMKCRRFGEASCAF

SEQ ID NO: 445 - protein, 190 aa, synthetic construct
  REGION 1..190: note = Synthetic
FPAMSLSGLFANAVLRVQHLHQLAADTFKEFERTYIPEGQRYSIQNTQVAFCFSETIPAPTGKNEAQQKSDLELLRISLLLIQSWLGPLQFLSRVFTNSLVFGTSDRVYEKLKDLEEGILALMRELEDGPPRAGQILKQTYDKFDTNMRSDDALLKNYGLLSCFRKDLHKTETYLRVMKCRRFGEASCAF

SEQ ID NO: 446 - protein, 190 aa, synthetic construct
  REGION 1..190: note = Synthetic
FPAMPLSSLFANAVLRAQHLHQLAADTYKEFERAYIPEGQRYSIQNAQAAFCFSETIPAPTGKDEAQQRSDMELLRFSLLLIQSWLGPVQLLSRVFTNSLVLGTSDRVYEKLKDLEEGIQALMRELEDGSPRVGQILKQTYDKFDTNLRSDDALLKNYGLLSCFKKDLHKAETYLRVMKCRRFVESSCAF

SEQ ID NO: 447 - protein, 191 aa, synthetic construct
  REGION 1..191: note = Synthetic
FPTIPLSRLLDNAMLRAHRLHQLAFDTYQEFEEAYIPKEQKYSFLQNPQTSLCFSESIPTPASKKETQQKSNLELLRMSLLLIQSWFEPVQFLRSVFANSLLYGVSDSDVYEYLKDLEEGIQTLMGRLEDGSPRTGEIFMQTYRKFDVNSQNNDALLKNYGLLYCFRKDMDKVETFLRIVQCRSVEGSCGF

SEQ ID NO: 448 - protein, 190 aa, synthetic construct
  REGION 1..190: note = Synthetic
FPAMPLSSLFANAVLRAQHLHQLVADTYKEFERTYIPEAQRHSIQSTQTAFCFSETIPAPTGKDEAQQRSDVELLRFSLLLIQSWLSPVQFLSRVFTNSLVFGTSDRVYEKLRDLEEGIQALMQELEDGSSRGGLVLKTTYDKFDTNLRSDEALLKNYGLLSCFKKDLHKAETYLRVMKCRRFVESSCAF

SEQ ID NO: 449 - protein, 191 aa, synthetic construct
  REGION 1..191: note = Synthetic
FPTIPLSRLFDNAMLRAHRLHQLAFDTYQEFEEAYIPKEQKYSFLQNPQTSLCFSESIPTPSNREETQQKSNLELLRISLLLIQSWLEPVQFLRSVFANSLVYGTSYSDVYDLLKDLEEGIQTLMGRLEDGSSRTGQIFKQTYSKFDTNSHNNDALLKNYGLLYCFRKDMDKIETFLRIVQCRSVEGSCGF

SEQ ID NO: 450 - protein, 177 aa, synthetic construct; identical to SEQ ID NO: 410
  REGION 1..177: note = Synthetic

SEQ ID NO: 451 - protein, 175 aa, synthetic construct; identical to SEQ ID NO: 411
  REGION 1..175: note = Synthetic

SEQ ID NO: 452 - protein, 176 aa, synthetic construct; identical to SEQ ID NO: 412
  REGION 1..176: note = Synthetic

SEQ ID NO: 453 - protein, 178 aa, synthetic construct; identical to SEQ ID NO: 413
  REGION 1..178: note = Synthetic

SEQ ID NO: 454 - protein, 178 aa, synthetic construct; identical to SEQ ID NO: 414
  REGION 1..178: note = Synthetic

SEQ ID NO: 455 - protein, 153 aa, synthetic construct; identical to SEQ ID NO: 415
  REGION 1..153: note = Synthetic

SEQ ID NO: 456 - protein, 178 aa, synthetic construct
  REGION 1..178: note = Synthetic
MHSSALLCCLVLLTGVRASPGQGTQSENSCTHFPGNLPNMLRDLRDAFSRVKTFFQMKDQLDNLLLKESLLEDFKGYLGCQALSEMIQFYLEEVMPQAENQDPDIKAHVNSLGENLKTLRLRLRRCHRFLPCENKSKAVEQVKNAFNKLQEKGIYKAMSEFDIFINYIEAYMTMKIRN

SEQ ID NO: 457 - protein, 11 aa, synthetic construct
  REGION 1..11: note = Synthetic
YGRKKRRQRRR

SEQ ID NO: 458 - protein, 12 aa, synthetic construct
  REGION 1..12: note = Synthetic
RRQRRTSKLMKR

SEQ ID NO: 459 - protein, 27 aa, synthetic construct
  REGION 1..27: note = Synthetic
GWTLNSAGYLLGKINLKALAALAKKIL

SEQ ID NO: 460 - protein, 33 aa, synthetic construct
  REGION 1..33: note = Synthetic
KALAWEAKLAKALAKALAKHLAKALAKALKCEA

SEQ ID NO: 461 - protein, 16 aa, synthetic construct
  REGION 1..16: note = Synthetic
RQIKIWFQNRRMKWKK

SEQ ID NO: 462 - protein, 11 aa, synthetic construct
  REGION 1..11: note = Synthetic
YGRKKRRQRRR

SEQ ID NO: 463 - protein, 9 aa, synthetic construct
  REGION 1..9: note = Synthetic
RKKRRQRRR

SEQ ID NO: 464 - protein, 11 aa, synthetic construct
  REGION 1..11: note = Synthetic
YGRKKRRQRRR

SEQ ID NO: 465 - protein, 8 aa, synthetic construct
  REGION 1..8: note = Synthetic
RKKRRQRR

SEQ ID NO: 466 - protein, 11 aa, synthetic construct
  REGION 1..11: note = Synthetic
YARAAARQARA

SEQ ID NO: 467 - protein, 11 aa, synthetic construct
  REGION 1..11: note = Synthetic
THRLPRRRRRR

SEQ ID NO: 468 - protein, 11 aa, synthetic construct
  REGION 1..11: note = Synthetic
GGRRARRRRRR

SEQ ID NO: 469 - protein, 119 aa, synthetic construct [sequence omitted]

SEQ ID NO: 470 - protein, 122 aa, synthetic construct [sequence omitted]

SEQ ID NO: 471 - protein, 119 aa, synthetic construct
  REGION 1..119: note = Synthetic
QVQLVQSGGGVVQPGRSLRLSCKASGYTFTSYTMHWVRQAPGKGLEWIGYINPSSGYTKYNQKFKDRFTISADKSKSTAFLQMDSLRPEDTGVYFCARWQDYDVYFDYWGQGTPVTVSS

SEQ ID NO: 472 - protein, 119 aa, synthetic construct [sequence omitted]

SEQ ID NO: 473 - protein, 119 aa, synthetic construct
  REGION 1..119: note = Synthetic
DIKLQQSGAELARPGASVKMSCKTSGYTFTRYTMHWVKQRPGQGLEWIGYINPSRGYTNYNQKFKDKATLTTDKSSSTAYMQLSSLTSEDSAVYYCARYYDDHYCLDYWGQGTTLTVSS

SEQ ID NO: 474 - protein, 119 aa, synthetic construct
  REGION 1..119: note = Synthetic
DVQLVQSGAEVKKPGASVKVSCKASGYTFTRYTMHWVRQAPGQGLEWIGYINPSRGYTNYADSVKGRFTITTDKSTSTAYMELSSLRSEDTATYYCARYYDDHYCLDYWGQGTTVTVSS

SEQ ID NO: 475 - protein, 125 aa, synthetic construct
  REGION 1..125: note = Synthetic
EVQLVESGGGLVQPGGSLKLSCAASGFTFNKYAMNWVRQAPGKGLEWVARIRSKYNNYATYYADSVKDRFTISRDDSKNTAYLQMNNLKTEDTAVYYCVRHGNFGNSYISYWAYWGQGTLVTVSS

SEQ ID NO: 476 - protein, 125 aa, synthetic construct
  REGION 1..125: note = Synthetic
EVQLVESGGGLVQPGGSLRLSCAASGFTFNTYAMNWVRQAPGKGLEWVGRIRSKYNNYATYYADSVKGRFTISRDDSKNTLYLQMNSLRAEDTAVYYCVRHGNFGNSYVSWFAYWGQGTLVTVSS

SEQ ID NO: 477 - protein, 125 aa, synthetic construct
  REGION 1..125: note = Synthetic
EVQLLESGGGLVQPGGSLKLSCAASGFTFNTYAMNWVRQAPGKGLEWVARIRSKYNNYATYYADSVKDRFTISRDDSKNTAYLQMNNLKTEDTAVYYCVRHGNFGNSYVSWFAYWGQGTLVTVSS

SEQ ID NO: 478 - protein, 125 aa, synthetic construct
  REGION 1..125: note = Synthetic
EVKLLESGGGLVQPKGSLKLSCAASGFTFNTYAMNWVRQAPGKGLEWVARIRSKYNNYATYYADSVKDRFTISRDDSQSILYLQMNNLKTEDTAMYYCVRHGNFGNSYVSWFAYWGQGTLVTVSS

SEQ ID NO: 479 - protein, 107 aa, synthetic construct
  REGION 1..107: note = Synthetic
DIQMTQSPSSLSASVGDRVTITCSASSSVSYMNWYQQTPGKAPKRWIYDTSKLASGVPSRFSGSGSGTDYTFTISSLQPEDIATYYCQQWSSNPFTFGQGTKLQITR

SEQ ID NO: 480 - protein, 107 aa, synthetic construct [sequence omitted]

SEQ ID NO: 481 - protein, 107 aa, synthetic construct
  REGION 1..107: note = Synthetic
DIQMTQSPSSLSASVGDRVTMTCRASSSVSYMHWYQQTPGKAPKPWIYATSNLASGVPSRFSGSGSGTDYTLTISSLQPEDIATYYCQQWSSNPPTFGQGTKLQITR

SEQ ID NO: 482 - protein, 107 aa, synthetic construct
  REGION 1..107: note = Synthetic
QIVLTQSPAIMSASPGEKVTMTCSASSSVSYMNWYQQKSGTSPKRWIYDTSKLASGVPAHFRGSGSGTSYSLTISGMEAEDAATYYCQQWSSNPFTFGSGTKLEINR

SEQ ID NO: 483 - protein, 106 aa, synthetic construct
  REGION 1..106: note = Synthetic
DIQLTQSPAIMSASPGEKVTMTCRASSSVSYMNWYQQKSGTSPKRWIYDTSKVASGVPYRFSGSGSGTSYSLTISSMEAEDAATYYCQQWSSNPLTFGAGTKLELK

SEQ ID NO: 484 - protein, 106 aa, synthetic construct
  REGION 1..106: note = Synthetic
DIVLTQSPATLSLSPGERATLSCRASQSVSYMNWYQQKPGKAPKRWIYDTSKVASGVPARFSGSGSGTDYSLTINSLEAEDAATYYCQQWSSNPLTFGGGTKVEIK

SEQ ID NO: 485 - protein, 109 aa, synthetic construct
  REGION 1..109: note = Synthetic
QTVVTQEPSLTVSPGGTVTLTCGSSTGAVTSGYYPNWVQQKPGQAPRGLIGGTKFLAPGTPARFSGSLLGGKAALTLSGVQPEDEAEYYCALWYSNRWVFGGGTKLTVL

SEQ ID NO: 486 - protein, 109 aa, synthetic construct
  REGION 1..109: note = Synthetic
QAVVTQEPSLTVSPGGTVTLTCGSSTGAVTTSNYANWVQQKPGQAPRGLIGGTNKRAPGVPARFSGSLLGGKAALTLSGAQPEDEAEYYCALWYSNLWVFGGGTKLTVL

SEQ ID NO: 487 - protein, 109 aa, synthetic construct
  REGION 1..109: note = Synthetic
ELVVTQEPSLTVSPGGTVTLTCRSSTGAVTTSNYANWVQQKPGQAPRGLIGGTNKRAPGTPARFSGSLLGGKAALTLSGVQPEDEAEYYCALWYSNLWVFGGGTKLTVL

SEQ ID NO: 488 - protein, 109 aa, synthetic construct
  REGION 1..109: note = Synthetic
QAVVTQESALTTSPGETVTLTCRSSTGAVTTSNYANWVQEKPDHLFTGLIGGTNKRAPGVPARFSGSLIGDKAALTITGAQTEDEAIYFCALWYSNLWVFGGGTKLTVL

SEQ ID NO: 489 - protein, 11 aa, synthetic construct
  REGION 1..11: note = Synthetic
RASQDIRNYLN

SEQ ID NO: 490 - protein, 7 aa, synthetic construct
  REGION 1..7: note = Synthetic
YTSRLES

SEQ ID NO: 491 - protein, 9 aa, synthetic construct
  REGION 1..9: note = Synthetic
QQGNTLPWT

SEQ ID NO: 492 - protein, 10 aa, synthetic construct
  REGION 1..10: note = Synthetic
GYSFTGYTMN

SEQ ID NO: 493 - protein, 10 aa, synthetic construct
  REGION 1..10: note = Synthetic
LINPYKGVST

SEQ ID NO: 494 - protein, 13 aa, synthetic construct
  REGION 1..13: note = Synthetic
SGYYGDSDWYFDV

SEQ ID NO: 495 - protein, 30 aa, synthetic construct
  REGION 1..30: note = Synthetic
GSGEGSEGEGGGEGSEGEGSGEGGEGEGSG

SEQ ID NO: 496 - protein, 32 aa, synthetic construct
  REGION 1..32: note = Synthetic
TGSGEGSEGEGGGEGSEGEGSGEGGEGEGSGT

SEQ ID NO: 497 - protein, 30 aa, synthetic construct
  REGION 1..30: note = Synthetic
GATPPETGAETESPGETTGGSAESEPPGEG

SEQ ID NO: 498 - protein, 30 aa, synthetic construct
  REGION 1..30: note = Synthetic
GSAAPTAGTTPSASPAPPTGGSSAAGSPST

SEQ ID NO: 499 - protein, 6 aa, synthetic construct
  REGION 1..6: note = Synthetic
SGGGGS

SEQ ID NO: 500 - protein, 5 aa, synthetic construct
  REGION 1..5: note = Synthetic
GGGGS

SEQ ID NO: 501 - protein, 6 aa, synthetic construct
  REGION 1..6: note = Synthetic
GGSGGS

SEQ ID NO: 502 - protein, 14 aa, synthetic construct
  REGION 1..14: note = Synthetic
RSSNGAVTSSNYAN

SEQ ID NO: 503 - protein, 14 aa, synthetic construct
  REGION 1..14: note = Synthetic
RSSNGEVTTSNYAN

SEQ ID NO: 504 - protein, 14 aa, synthetic construct
  REGION 1..14: note = Synthetic
RSSTGAVTTSNYAN

SEQ ID NO: 505 - protein, 7 aa, synthetic construct
  REGION 1..7: note = Synthetic
GTNKRAP

SEQ ID NO: 506 - protein, 7 aa, synthetic construct
  REGION 1..7: note = Synthetic
GTIKRAP

SEQ ID NO: 507 - protein, 10 aa, synthetic construct
  REGION 1..10: note = Synthetic
ALWYPNLWVF

SEQ ID NO: 508 - protein, 10 aa, synthetic construct
  REGION 1..10: note = Synthetic
ALWYSNLWVF

SEQ ID NO: 509 - protein, 10 aa, synthetic construct
  REGION 1..10: note = Synthetic
GFTFNTYAMN

SEQ ID NO: 510 - protein, 19 aa, synthetic construct
  REGION 1..19: note = Synthetic
RIRSKYNNYATYYADSVKD

SEQ ID NO: 511 - protein, 14 aa, synthetic construct
  REGION 1..14: note = Synthetic
HENFGNSYVSWFAH

SEQ ID NO: 512 - protein, 14 aa, synthetic construct
  REGION 1..14: note = Synthetic
HGNFGNSYVSWFAY

SEQ ID NO: 513 - protein, 22 aa, synthetic construct
  REGION 1..22: note = Synthetic
ELVVTQEPSLTVSPGGTVTLTC

SEQ ID NO: 514 - protein, 15 aa, synthetic construct
  REGION 1..15: note = Synthetic
WVQQKPGQAPRGLIG

SEQ ID NO: 515 - protein, 32 aa, synthetic construct
  REGION 1..32: note = Synthetic
GTPARFSGSLLGGKAALTLSGVQPEDEAVYYC

SEQ ID NO: 516 - protein, 32 aa, synthetic construct
  REGION 1..32: note = Synthetic
GTPARFSGSSLGGKAALTLSGVQPEDEAVYYC

SEQ ID NO: 517 - protein, 32 aa, synthetic construct
  REGION 1..32: note = Synthetic
GTPARFSGSLLGGSAALTLSGVQPEDEAVYYC

SEQ ID NO: 518 - protein, 32 aa, synthetic construct
  REGION 1..32: note = Synthetic
GTPARFSGSSLGGSAALTLSGVQPEDEAVYYC

SEQ ID NO: 519 - protein, 32 aa, synthetic construct
  REGION 1..32: note = Synthetic
GTPARFSGSLLGGKAALTLSGVQPEDEAEYYC

SEQ ID NO: 520 - protein, 32 aa, synthetic construct
  REGION 1..32: note = Synthetic
GTPARFSGSSLGGSAALTLSGVQPEDEAEYYC

SEQ ID NO: 521 - protein, 9 aa, synthetic construct
  REGION 1..9: note = Synthetic
GGGTKLTVL

SEQ ID NO: 522 - protein, 25 aa, synthetic construct
  REGION 1..25: note = Synthetic
EVQLLESGGGIVQPGGSLKLSCAAS

SEQ ID NO: 523 - protein, 25 aa, synthetic construct
  REGION 1..25: note = Synthetic
EVQLQESGGGIVQPGGSLKLSCAAS

SEQ ID NO: 524 - protein, 25 aa, synthetic construct
  REGION 1..25: note = Synthetic
EVQLQESGGGLVQPGGSLKLSCAAS

SEQ ID NO: 525 - protein, 25 aa, synthetic construct
  REGION 1..25: note = Synthetic
EVQLLESGGGLVQPGGSLKLSCAAS

SEQ ID NO: 526 - protein, 14 aa, synthetic construct
  REGION 1..14: note = Synthetic
WVRQAPGKGLEWVA

SEQ ID NO: 527 - protein, 32 aa, synthetic construct
  REGION 1..32: note = Synthetic
RFTISRDDSKNTVYLQMNNLKTEDTAVYYCVR

SEQ ID NO: 528 - protein, 32 aa, synthetic construct
  REGION 1..32: note = Synthetic
RFTISRDDSKNTAYLQMNNLKTEDTAVYYCVR

SEQ ID NO: 529 - protein, 11 aa, synthetic construct
  REGION 1..11: note = Synthetic
WGQGTLVTVSS

SEQ ID NO: 530 - protein, 109 aa, synthetic construct
  REGION 1..109: note = Synthetic
ELVVTQEPSLTVSPGGTVTLTCRSSNGAVTSSNYANWVQQKPGQAPRGLIGGTNKRAPGTPARFSGSLLGGKAALTLSGVQPEDEAVYYCALWYPNLWVFGGGTKLTVL

SEQ ID NO: 531 - protein, 125 aa, synthetic construct
  REGION 1..125: note = Synthetic
EVQLLESGGGIVQPGGSLKLSCAASGFTFNTYAMNWVRQAPGKGLEWVARIRSKYNNYATYYADSVKDRFTISRDDSKNTVYLQMNNLKTEDTAVYYCVRHENFGNSYVSWFAHWGQGTLVTVSS

SEQ ID NO: 532 - protein, 109 aa, synthetic construct
  REGION 1..109: note = Synthetic
ELVVTQEPSLTVSPGGTVTLTCRSSNGEVTTSNYANWVQQKPGQAPRGLIGGTIKRAPGTPARFSGSLLGGKAALTLSGVQPEDEAVYYCALWYPNLWVFGGGTKLTVL

SEQ ID NO: 533 - protein, 109 aa, synthetic construct
  REGION 1..109: note = Synthetic
ELVVTQEPSLTVSPGGTVTLTCRSSNGAVTSSNYANWVQQKPGQAPRGLIGGTNKRAPGTPARFSGSSLGGKAALTLSGVQPEDEAVYYCALWYPNLWVFGGGTKLTVL

SEQ ID NO: 534 - protein, 125 aa, synthetic construct
  REGION 1..125: note = Synthetic
EVQLQESGGGIVQPGGSLKLSCAASGFTFNTYAMNWVRQAPGKGLEWVARIRSKYNNYATYYADSVKDRFTISRDDSKNTVYLQMNNLKTEDTAVYYCVRHENFGNSYVSWFAHWGQGTLVTVSS

SEQ ID NO: 535 - protein, 109 aa, synthetic construct
  REGION 1..109: note = Synthetic
ELVVTQEPSLTVSPGGTVTLTCRSSNGAVTSSNYANWVQQKPGQAPRGLIGGTNKRAPGTPARFSGSLLGGSAALTLSGVQPEDEAVYYCALWYPNLWVFGGGTKLTVL

SEQ ID NO: 536 - protein, 109 aa, synthetic construct
  REGION 1..109: note = Synthetic
ELVVTQEPSLTVSPGGTVTLTCRSSNGAVTSSNYANWVQQKPGQAPRGLIGGTNKRAPGTPARFSGSSLGGSAALTLSGVQPEDEAVYYCALWYPNLWVFGGGTKLTVL

SEQ ID NO: 537 - protein, 109 aa, synthetic construct; identical to SEQ ID NO: 487
  REGION 1..109: note = Synthetic

SEQ ID NO: 538 - protein, 125 aa, synthetic construct; identical to SEQ ID NO: 477
  REGION 1..125: note = Synthetic

SEQ ID NO: 539 - protein, 109 aa, synthetic construct
  REGION 1..109: note = Synthetic
ELVVTQEPSLTVSPGGTVTLTCRSSTGAVTTSNYANWVQQKPGQAPRGLIGGTNKRAPGTPARFSGSSLGGSAALTLSGVQPEDEAEYYCALWYSNLWVFGGGTKLTVL

SEQ ID NO: 540 - protein, 125 aa, synthetic construct
  REGION 1..125: note = Synthetic
EVQLQESGGGLVQPGGSLKLSCAASGFTFNTYAMNWVRQAPGKGLEWVARIRSKYNNYATYYADSVKDRFTISRDDSKNTAYLQMNNLKTEDTAVYYCVRHGNFGNSYVSWFAYWGQGTLVTVSS

SEQ ID NO: 541 - protein, 264 aa, synthetic construct
  REGION 1..264: note = Synthetic
ELVVTQEPSLTVSPGGTVTLTCRSSNGAVTSSNYANWVQQKPGQAPRGLIGGTNKRAPGTPARFSGSLLGGKAALTLSGVQPEDEAVYYCALWYPNLWVFGGGTKLTVLGATPPETGAETESPGETTGGSAESEPPGEGEVQLLESGGGIVQPGGSLKLSCAASGFTFNTYAMNWVRQAPGKGLEWVARIRSKYNNYATYYADSVKDRFTISRDDSKNTVYLQMNNLKTEDTAVYYCVRHENFGNSYVSWFAHWGQGTLVTVSS

SEQ ID NO: 542 - protein, 264 aa, synthetic construct
  REGION 1..264: note = Synthetic
ELVVTQEPSLTVSPGGTVTLTCRSSNGEVTTSNYANWVQQKPGQAPRGLIGGTIKRAPGTPARFSGSLLGGKAALTLSGVQPEDEAVYYCALWYPNLWVFGGGTKLTVLGATPPETGAETESPGETTGGSAESEPPGEGEVQLLESGGGIVQPGGSLKLSCAASGFTFNTYAMNWVRQAPGKGLEWVARIRSKYNNYATYYADSVKDRFTISRDDSKNTVYLQMNNLKTEDTAVYYCVRHENFGNSYVSWFAHWGQGTLVTVSS

SEQ ID NO: 543 - protein, 264 aa, synthetic construct
  REGION 1..264: note = Synthetic
ELVVTQEPSLTVSPGGTVTLTCRSSNGAVTSSNYANWVQQKPGQAPRGLIGGTNKRAPGTPARFSGSSLGGKAALTLSGVQPEDEAVYYCALWYPNLWVFGGGTKLTVLGATPPETGAETESPGETTGGSAESEPPGEGEVQLQESGGGIVQPGGSLKLSCAASGFTFNTYAMNWVRQAPGKGLEWVARIRSKYNNYATYYADSVKDRFTISRDDSKNTVYLQMNNLKTEDTAVYYCVRHENFGNSYVSWFAHWGQGTLVTVSS

SEQ ID NO: 544 - protein, 264 aa, synthetic construct
  REGION 1..264: note = Synthetic
ELVVTQEPSLTVSPGGTVTLTCRSSNGAVTSSNYANWVQQKPGQAPRGLIGGTNKRAPGTPARFSGSLLGGSAALTLSGVQPEDEAVYYCALWYPNLWVFGGGTKLTVLGATPPETGAETESPGETTGGSAESEPPGEGEVQLQESGGGIVQPGGSLKLSCAASGFTFNTYAMNWVRQAPGKGLEWVARIRSKYNNYATYYADSVKDRFTISRDDSKNTVYLQMNNLKTEDTAVYYCVRHENFGNSYVSWFAHWGQGTLVTVSS

SEQ ID NO: 545 - protein, 264 aa, synthetic construct
  REGION 1..264: note = Synthetic
ELVVTQEPSLTVSPGGTVTLTCRSSNGAVTSSNYANWVQQKPGQAPRGLIGGTNKRAPGTPARFSGSSLGGSAALTLSGVQPEDEAVYYCALWYPNLWVFGGGTKLTVLGATPPETGAETESPGETTGGSAESEPPGEGEVQLQESGGGIVQPGGSLKLSCAASGFTFNTYAMNWVRQAPGKGLEWVARIRSKYNNYATYYADSVKDRFTISRDDSKNTVYLQMNNLKTEDTAVYYCVRHENFGNSYVSWFAHWGQGTLVTVSS

SEQ ID NO: 546 - protein, 264 aa, synthetic construct
  REGION 1..264: note = Synthetic
ELVVTQEPSLTVSPGGTVTLTCRSSTGAVTTSNYANWVQQKPGQAPRGLIGGTNKRAPGTPARFSGSLLGGKAALTLSGVQPEDEAEYYCALWYSNLWVFGGGTKLTVLGATPPETGAETESPGETTGGSAESEPPGEGEVQLLESGGGLVQPGGSLKLSCAASGFTFNTYAMNWVRQAPGKGLEWVARIRSKYNNYATYYADSVKDRFTISRDDSKNTAYLQMNNLKTEDTAVYYCVRHGNFGNSYVSWFAYWGQGTLVTVSS

SEQ ID NO: 547 - protein, 264 aa, synthetic construct
  REGION 1..264: note = Synthetic
ELVVTQEPSLTVSPGGTVTLTCRSSTGAVTTSNYANWVQQKPGQAPRGLIGGTNKRAPGTPARFSGSSLGGSAALTLSGVQPEDEAEYYCALWYSNLWVFGGGTKLTVLGATPPETGAETESPGETTGGSAESEPPGEGEVQLQESGGGLVQPGGSLKLSCAASGFTFNTYAMNWVRQAPGKGLEWVARIRSKYNNYATYYADSVKDRFTISRDDSKNTAYLQMNNLKTEDTAVYYCVRHGNFGNSYVSWFAYWGQGTLVTVSS

SEQ ID NO: 548 - protein, 256 aa, synthetic construct
  REGION 1..256: note = Synthetic
QSVLTQPPSASGTPGQRVTISCSGSSSNIGSNYVYWYQQLPGTAPKLLIYRNNQRPSGVPDRFSGSKSGTSASLAISGLRSEDEADYYCAAWDDSLSGLWVFGGGTKLTVLGATPPETGAETESPGETTGGSAESEPPGEGQVQLQQWGGGLVKPGGSLRLSCAASGFTFSSYSMNWVRQAPGKGLEWVSRINSDGSSTNYADSVKGRFTISRDNAKNTLYLQMNSLRAEDTAVYYCARELRWGNWGQGTLVTVSS

SEQ ID NO: 549 - protein, 255 aa, synthetic construct
  REGION 1..255: note = Synthetic
QAGLTQPPSASGTPGQRVTLSCSGSYSNIGTYYVYWYQQLPGTAPKLLIYSNDQRLSGVPDRFSGSKSGTSASLAISGLQSEDEAAYYCAAWDDSLNGWAFGGGTKLTVLGATPPETGAETESPGETTGGSAESEPPGEGQVQLQQWGGGLVKPGGSLRLSCAASGFTFSSYSMNWVRQAPGKGLEWVSRINSDGSSTNYADSVKGRFTISRDNAKNTLYLQMNSLRAEDTAVYYCARELRWGNWGQGTLVTVSS

SEQ ID NO: 550 - protein, 255 aa, synthetic construct
  REGION 1..255: note = Synthetic
QPGLTQPPSASGTPGQRVTLSCSGRSSNIGSYYVYWYQHLPGMAPKLLIYRNSRRPSGVPDRFSGSKSGTSASLVISGLQSDDEADYYCAAWDDSLKSWVFGGGTKLTVLGATPPETGAETESPGETTGGSAESEPPGEGQVQLQQWGGGLVKPGGSLRLSCAASGFTFSSYSMNWVRQAPGKGLEWVSRINSDGSSTNYADSVKGRFTISRDNAKNTLYLQMNSLRAEDTAVYYCARELRWGNWGQGTLVTVSS

SEQ ID NO: 551 - protein, 255 aa, synthetic construct
  REGION 1..255: note = Synthetic
QSVLTQPPSASGTPGQRVTISCSGSSSNIGTNYVYWYQQFPGTAPKLLIYSNNQRPSGVPDRFSGSKSGTSGSLAISGLQSEDEADYSCAAWDDSLNGWVFGGGTKLTVLGATPPETGAETESPGETTGGSAESEPPGEGQVQLVQWGGGLVKPGGSLRLSCAASGFTFSSYSMNWVRQAPGKGLEWVSRINSDGSSTNYADSVKGRFTISRDNAKNTLYLQMNSLRAEDTAVYYCARELRWGNWGQGTLVTVSS

SEQ ID NO: 552 - protein, 255 aa, synthetic construct
  REGION 1..255: note = Synthetic
QPGLTQPPSASGTPGQRVTISCSGSSSNIGSNYVYWYQQLPGTAPKLLIYRNNQRPSGVPDRLSGSKSGTSASLAISGLRSEDEADYYCAAWDDSLSGWVFGGGTKLTVLGATPPETGAETESPGETTGGSAESEPPGEGQVQLVQWGGGLVKPGGSLRLSCAASGFTFSSYSMNWVRQAPGKGLEWVSRINSDGSSTNYADSVKGRFTISRDNAKNTLYLQMNSLRAEDTAVYYCARELRWGNWGQGTLVTVSS

SEQ ID NO: 553 - protein, 256 aa, synthetic construct
  REGION 1..256: note = Synthetic
QAVLTQPPSASGTPGQRVTISCSGSSSNIGSYYVYWYQQVPGAAPKLLMRLNNQRPSGVPDRFSGAKSGTSASLVISGLRSEDEADYYCAAWDDSLSGQWVFGGGTKLTVLGATPPETGAETESPGETTGGSAESEPPGEGQVQLQQWGGGLVKPGGSLRLSCAASGFTFSSYSMNWVRQAPGKGLEWVSRINSDGSSTNYADSVKGRFTISRDNAKNTLYLQMNSLRAEDTAVYYCARELRWGNWGQGTLVTVSS

SEQ ID NO: 554 - protein, 255 aa, synthetic construct
  REGION 1..255: note = Synthetic
QAGLTQPPSASGTPGQRVTISCSGSSSNIGSNYVYWYQQLPGTAPKLLIYRNNQRPSGVPDRFSGSKSGTSASLAISGLRSEDEADYYCATWDASLSGWVFGGGTKLTVLGATPPETGAETESPGETTGGSAESEPPGEGEVQLVQWGGGLVKPGGSLRLSCAASGFTFSSYSMNWVRQAPGKGLEWVSRINSDGSSTNYADSVKGRFTISRDNAKNTLYLQMNSLRAEDTAVYYCARELRWGNWGQGTLVTVSS

SEQ ID NO: 555 - protein, 123 aa, synthetic construct [sequence omitted]

SEQ ID NO: 556 - protein, 122 aa, synthetic construct
  REGION 1..122: note = Synthetic
EVQLVESGGGLVQPGGSLRLSCAASGFTFSSYDIHWVRQATGKGLEWVSAIGPAGDTYYPGSVKGRFTISRENAKNSLYLQMNSLRAGDTAVYYCARGLITFGGLIAPFDYWGQGTLVTVSS

SEQ ID NO: 557 - protein, 120 aa, synthetic construct
  REGION 1..120: note = Synthetic
QVKLEQSGAEVVKPGASVKLSCKASGFNIKDSYMHWLRQGPGQRLEWIGWIDPENGDTEYAPKFQGKATFTTDTSANTAYLGLSSLRPEDTAVYYCNEGTPTGPYYFDYWGQGTLVTVSS

SEQ ID NO: 558 - protein, 121 aa, synthetic construct
  REGION 1..121: note = Synthetic
EVQLVESGGGLVQPGGSLRLSCAASGFNIKDTYMHWVRQAPGKGLEWVARIDPANGNSKYADSVKGRFTISADTSKNTAYLQMNSLRAEDTAVYYCAPFGYYVSDYAMAYWGQGTLVTVSS

SEQ ID NO: 559 - protein, 121 aa, synthetic construct
  REGION 1..121: note = Synthetic
EVQLVESGGGLVQPGGSLRLSCAASGFNIKDTYMHWVRQAPGKGLEWVARIDPANGNSKYVPKFQGRATISADTSKNTAYLQMNSLRAEDTAVYYCAPFGYYVSDYAMAYWGQGTLVTVSS

SEQ ID NO: 560 - protein, 119 aa, synthetic construct
  REGION 1..119: note = Synthetic
EVQLVESGGGVVQPGRSLRLSCSASGFDFTTYWMSWVRQAPGKGLEWIGEIHPDSSTINYAPSLKDRFTISRDNAKNTLFLQMDSLRPEDTGVYFCASLYFGFPWFAYWGQGTPVTVSS

SEQ ID NO: 561 - protein, 121 aa, synthetic construct
  REGION 1..121: note = Synthetic
EVKLVESGGGLVQPGGSLRLSCATSGFTFTDYYMNWVRQPPGKALEWLGFIGNKANGYTTEYSASVKGRFTISRDKSQSILYLQMNTLRAEDSATYYCTRDRGLRFYFDYWGQGTTLTVSS

SEQ ID NO: 562 - protein, 121 aa, synthetic construct
  REGION 1..121: note = Synthetic
EVQLVESGGGLVQPGRSLRLSCAASGFTVSSYWMHWVRQAPGKGLEWVGFIRNKANGGTTEYAASVKGRFTISRDDSKNTLYLQMNSLRAEDTAVYYCARDRGLRFYFDYWGQGTTVTVSS

SEQ ID NO: 563 - protein, 124 aa, synthetic construct
  REGION 1..124: note = Synthetic
QVQLQQSGAELVRPGSSVKISCKASGYAFSSYWMNWVKQRPGQGLEWIGQIWPGDGDTNYNGKFKGKATLTADESSSTAYMQLSSLASEDSAVYFCARRETTTVGRYYYAMDYWGQGTTVTVSS

SEQ ID NO: 564 - protein, 122 aa, synthetic construct
  REGION 1..122: note = Synthetic
EVQLVESGGGLVQPGRSLRLSCAASGFTFNDYAMHWVRQAPGKGLEWVSTISWNSGSIGYADSVKGRFTISRDNAKKSLYLQMNSLRAEDTALYYCAKDIQYGNYYYGMDVWGQGTTVTVSS

SEQ ID NO: 565 - protein, 122 aa, synthetic construct
  REGION 1..122: note = Synthetic
QAYLQQSGAELVRPGASVKMSCKASGYTFTSYNMHWVKQTPRQGLEWIGAIYPGNGDTSYNQKFKGKATLTVDKSSSTAYMQLSSLTSEDSAVYFCARVVYYSNSYWYFDVWGTGTTVTVSG

SEQ ID NO: 566 - protein, 119 aa, synthetic construct
  REGION 1..119: note = Synthetic
QVQLVQSGAEVKKPGSSVKVSCKASGYAFSYSWINWVRQAPGQGLEWMGRIFPGDGDTDYNGKFKGRVTITADKSTSTAYMELSSLRSEDTAVYYCARNVFDGYWLVYWGQGTLVTVSS

SEQ ID NO: 567 - protein, 122 aa, synthetic construct [sequence omitted]

SEQ ID NO: 568 - protein, 121 aa, synthetic construct [sequence omitted]

SEQ ID NO: 569 - protein, 122 aa, synthetic construct [sequence omitted]

SEQ ID NO: 570 - protein, 114 aa, synthetic construct
  REGION 1..114: note = Synthetic
QLVQSGAEVKKPGSSVKVSCKASGYTITDSNIHWVRQAPGQSLEWIGYIYPYNGGTDYNQKFKNRATLTVDNPTNTAYMELSSLRSEDTDFYYCVNGNPWLAYWGQGTLVTVSS

SEQ ID NO: 571 - protein, 122 aa, synthetic construct [sequence omitted]

SEQ ID NO: 572 - protein, 118 aa, synthetic construct
  REGION 1..118: note = Synthetic
QIQLVQSGPEVKKPGETVKISCKASGYTFTNYGMNWVKQAPGKGLKWMGWINTYTGEPTYADAFKGRFAFSLETSASTAYLQINNLKNEDTATYFCARDYGDYGMDYWGQGTSVTVSS

SEQ ID NO: 573 - protein, 118 aa, synthetic construct
  REGION 1..118: note = Synthetic
QVQLQQSGTELMTPGASVTMSCKTSGYTFSTYWIEWVKQRPGHGLEWIGEILGPSGYTDYNEKFKAKATFTADTSSNTAYMQLSSLASEDSAVYYCARWDRLYAMDYWGGGTSVTVSS

SEQ ID NO: 574 - protein, 118 aa, synthetic construct
  REGION 1..118: note = Synthetic
QVQLVESGGGVVQPGRSLRLSCAASGFTFSSYIMHWVRQAPGKGLEWVAVISYDGRNKYYADSVKGRFTISRDNSKNTLYLQMNSLRAEDTAVYYCARDTDGYDFDYWGQGTLVTVSS

SEQ ID NO: 575 - protein, 119 aa, synthetic construct
  REGION 1..119: note = Synthetic
QIQLVESGGGVVQPGRSLRLSCAASGFTFGYYAMHWVRQAPGKGLEWVAVISYDGSIKYYADSVKGRFTISRDNSKNTLYLQMNSLRAEDTAVYYCAREGPYSNYLDYWGQGTLVTVSS

SEQ ID NO: 576 - protein, 118 aa, synthetic construct
  REGION 1..118: note = Synthetic
QVQLVESGGGVVQPGRSLRLSCATSGFTFSDYGMHWVRQAPGKGLEWVAVIWYDGSNKYYADSVKGRFTISRDNSKKTLSLQMNSLRAEDTAVYYCARDSIMVRGDYWGQGTLVTVSS

SEQ ID NO: 577 - protein, 118 aa, synthetic construct
  REGION 1..118: note = Synthetic
QVQLVESGGGVVQPGRSLRLSCAASGFTFSDHGMHWVRQAPGKGLEWVAVIWYDGSNKYYADSVKGRFTISRDNSKNTLYLQMNSLRAEDTAVYYCARDSIMVRGDYWGQGTLVTVSS

SEQ ID NO: 578 - protein, 122 aa, synthetic construct
  REGION 1..122: note = Synthetic
QVQLQESGPGLVKPSETLSLTCTVSGGSVSSDYYYWSWIRQPPGKGLEWLGYIYYSGSTNYNPSLKSRVTISVDTSKNQFSLKLRSVTTADTAVYYCARGDGDYGGNCFDYWGQGTLVTVSS

SEQ ID NO: 579 - protein, 117 aa, synthetic construct
  REGION 1..117: note = Synthetic
QVQLVQSGAEVKKPGASVKVSCKASGYTFTSYGFSWVRQAPGQGLEWMGWISASNGNTYYAQKLQGRVTMTTDTSTSTAYMELRSLRSDDTAVYYCARVYADYADYWGQGTLVTVSS

SEQ ID NO: 580 - protein, 115 aa, synthetic construct [sequence omitted]

SEQ ID NO: 581 - protein, 119 aa, synthetic construct [sequence omitted]

SEQ ID NO: 582 - protein, 125 aa, synthetic construct
  REGION 1..125: note = Synthetic
QVQLVESGGGVVQPGRSLRLSCAASGFTFSSYGMHWVRQAPGKGLEWVAVIWYDGSNKYYADSVKGRFTISRDNSKNTLYLQMNSLRAEDTAVYYCARDPRGATLYYYYYGMDVWGQGTTVTVSS

SEQ ID NO: 583 - protein, 118 aa, synthetic construct
  REGION 1..118: note = Synthetic
QVQLVESGGGVVQPGRSLRLSCAASGFTFSSYTMHWVRQAPGKGLEWVTFISYDGNNKYYADSVKGRFTISRDNSKNTLYLQMNSLRAEDTAIYYCARTGWLGPFDYWGQGTLVTVSS

SEQ ID NO: 584 - protein, 123 aa, synthetic construct
  REGION 1..123: note = Synthetic
QVQLQESGPGLVKPSQTLSLTCTVSGGSISSGGYYWSWIRQHPGKGLEWIGIIYYSGSTYYNPSLKSRVTISVDTSKNQFSLKLNSVTAADTAVFYCARVAIVTTIPGGMDVWGQGTTVTVSS

SEQ ID NO: 585 - protein, 120 aa, synthetic construct
  REGION 1..120: note = Synthetic
EVQLLEQSGAELVRPGTSVKISCKASGYAFTNYWLGWVKQRPGHGLEWIGDIFPGSGNIHYNEKFKGKATLTADKSSSTAYMQLSSLTFEDSAVYFCARLRNWDEPMDYWGQGTTVTVSS

SEQ ID NO: 586 - protein, 127 aa, synthetic construct
  REGION 1..127: note = Synthetic
EVQLLESGGGVVQPGRSLRLSCAASGFTFSSYGMHWVRQAPGKGLEWVAVISYDGSNKYYADSVKGRFTISRDNSKNTLYLQMNSLRAEDTAVYYCAKDMGWGSGWRPYYYYGMDVWGQGTTVTVSS

SEQ ID NO: 587 - protein, 116 aa, synthetic construct
  REGION 1..116: note = Synthetic
QVQLQQSGAELVRPGTSVKVSCKASGYAFTNYLIEWVKQRPGQGLEWIGVINPGSGGTNYNEKFKGKATLTADKSSSTAYMQLSSLTSDDSAVYFCARDGPWFAYWGQGTLVTVSA

SEQ ID NO: 588 - protein, 116 aa, synthetic construct
  REGION 1..116: note = Synthetic
QIQLVQSGPELKKPGETVKISCKASGYTFTNYGMNWVRQAPGKGLKWMGWINTYTGEPTYADDFKGRFVFSLETSASTAFLQLNNLRSEDTATYFCVRFISKGDYWGQGTSVTVSS

SEQ ID NO: 589 - protein, 114 aa, synthetic construct
  REGION 1..114: note = Synthetic
VQLQQSDAELVKPGASVKISCKASGYTFTDHAIHWVKQNPEQGLEWIGYFSPGNDDFKYNERFKGKATLTADKSSSTAYVQLNSLTSEDSAVYFCTRSLNMAYWGQGTSVTVSS

SEQ ID NO: 590 - protein, 116 aa, synthetic construct
  REGION 1..116: note = Synthetic
EVQLVQSGPEVKKPGASVKVSCKASGYTFTNYGMNWVRQAPGQGLEWMGWINTYTGEPTYGEDFKGRFAFSLDTSASTAYMELSSLRSEDTAVYFCARFGNYVDYWGQGSLVTVSS

SEQ ID NO: 591 - protein, 116 aa, synthetic construct
  REGION 1..116: note = Synthetic
EVQLVQSGPGLVQPGGSVRISCAASGYTFTNYGMNWVKQAPGKGLEWMGWINTYTGESTYADSFKGRFTFSLDTSASAAYLQINSLRAEDTAVYYCARFAIKGDYWGQGTLLTVSS

SEQ ID NO: 592 - protein, 116 aa, synthetic construct; identical to SEQ ID NO: 591
  REGION 1..116: note = Synthetic

SEQ ID NO: 593 - protein, 128 aa, synthetic construct
  REGION 1..128: note = Synthetic
EVQLLESGGGLVQPGGSLRLSCAASGFTFSHYMMAWVRQAPGKGLEWVSRIGPSGGPTHYADSVKGRFTISRDNSKNTLYLQMNSLRAEDTAVYYCAGYDSGYDYVAVAGPAEYFQHWGQGTLVTVSS

SEQ ID NO: 594 - protein, 119 aa, synthetic construct
  REGION 1..119: note = Synthetic
EVQLVESGGGVVQPGRSLRLSCSASGFTFSGYGLSWVRQAPGKGLEWVAMISSGGSYTYYADSVKGRFAISRDNAKNTLFLQMDSLRPEDTGVYFCARHGDDPAWFAYWGQGTPVTVSS

SEQ ID NO: 595 - protein, 118 aa, synthetic construct
  REGION 1..118: note = Synthetic
QVQLVQSGAEVVKPGASVKISCKASGYTFTGYFMNWVKQSPGQSLEWIGRIHPYDGDTFYNQKFQGKATLTVDKSSNTAHMELLSLTSEDFAVYYCTRYDGSRAMDYWGQGTTVTVSS

SEQ ID NO: 596 - protein, 118 aa, synthetic construct; identical to SEQ ID NO: 595
  REGION 1..118: note = Synthetic

SEQ ID NO: 597 - protein, 109 aa, synthetic construct
  REGION 1..109: note = Synthetic
GPELVKPGASVKISCKASDYSFTGYFMNWVMQSHGKSLEWIGRIFPYNGDTFYNQKFKGRATLTVDKSSSTAHMELRSLASEDSAVYFCARGTHYFDYWGQGTTLTVSS

SEQ ID NO: 598 - protein, 115 aa, synthetic construct
  REGION 1..115: note = Synthetic
QVQLVQSGAEVKKPGASVKVSCKASGYTFTDYEMHWVRQAPGQGLEWMGALDPKTGDTAYSQKFKGRVTLTADKSTSTAYMELSSLTSEDTAVYYCTRFYSYTYWGQGTLVTVSS

SEQ ID NO: 599 - protein, 117 aa, synthetic construct
  REGION 1..117: note = Synthetic
EVQLVQSGAEVKKPGESLKISCKGSGYSFTSYWIAWVRQMPGKGLEWMGIIFPGDSDTRYSPSFQGQVTISADRSIRTAYLQWSSLKASDTALYYCARTREGYFDYWGQGTLVTVSS

SEQ ID NO: 600 - protein, 117 aa, synthetic construct
  REGION 1..117: note = Synthetic
EVQLVQSGAEVKKPGESLKISCKGSGYSFTNYWIAWVRQMPGKGLEWMGIIYPGDSDTRYSPSFQGQVTISADKSIRTAYLQWSSLKASDTAMYYCARTREGYFDYWGQGTLVTVSS

SEQ ID NO: 601 - protein, 117 aa, synthetic construct
  REGION 1..117: note = Synthetic
EVQLVQSGADVTKPGESLKISCKVSGYRFTNYWIGWMRQMSGKGLEWMGIIYPGDSDTRYSPSFQGHVTISADKSINTAYLRWSSLKASDTAIYYCARTREGFFDYWGQGTPVTVSS

SEQ ID NO: 602 - protein, 124 aa, synthetic construct
  REGION 1..124: note = Synthetic
QVQLVESGGGVVQSGRSLRLSCAASGFTFRNYGMHWVRQAPGKGLEWVAVIWYDGSDKYYADSVRGRFTISRDNSKNTLYLQMNSLRAEDTAVYYCARDGYDILTGNPRDFDYWGQGTLVTVSS

SEQ ID NO: 603 - protein, 119 aa, synthetic construct
  REGION 1..119: note = Synthetic
QVQLKQSGPGLVQPSQSLSITCTVSGFSLTNYGVHWVRQSPGKGLEWLGVIWSGGNTDYNTPFTSRLSINKDNSKSQVFFKMNSLQSNDTAIYYCARALTYYDYEFAYWGQGTLVTVSA

SEQ ID NO: 604 - protein, 120 aa, synthetic construct [sequence omitted]

SEQ ID NO: 605 - protein, 125 aa, synthetic construct [sequence omitted]

SEQ ID NO: 606 - protein, 121 aa, synthetic construct [sequence omitted]

SEQ ID NO: 607 - protein, 121 aa, synthetic construct
  REGION 1..121: note = Synthetic
QVQLVQSGAEVKKPGSSVKVSCKASGGTFSSYAISWVRQAPGQGLEWMGSIIPIFGTVNYAQKFQGRVTITADESTSTAYMELSSLRSEDTAVYYCARDPSVNLYWYFDLWGRGTLVTVSS

SEQ ID NO: 608 - protein, 119 aa, synthetic construct
  REGION 1..119: note = Synthetic
QVQLVQSGAEVKKPGSSVKVSCKASGGTFGSYAISWVRQAPGQGLEWMGSIIPIFGAANPAQKSQGRVTITADESTSTAYMELSSLRSEDTAVYYCAKMGRGKVAFDIWGQGTMVTVSS

SEQ ID NO: 609 - protein, 123 aa, synthetic construct
  REGION 1..123: note = Synthetic
QVQLVQSGAEVKKPGASVKVSCKASGYAFTSYGINWVRQAPGQGLEWMGWISAYNGNTYYAQKLRGRVTMTTDTSTSTAYMELRSLRSDDTAVYYCARDLGGYGSGSVPFDPWGQGTLVTVSS

SEQ ID NO: 610 - protein, 123 aa, synthetic construct [sequence omitted]

SEQ ID NO: 611 - protein, 119 aa, synthetic construct [sequence omitted]

SEQ ID NO: 612 - protein, 118 aa, synthetic construct
  REGION 1..118: note = Synthetic
QIQLVQSGPELKKPGETVKISCKASGYTFTEYPIHWVKQAPGKGFKWMGMIYTDIGKPTYAEEFKGRFAFSLETSASTAYLQINNLKNEDTATYFCVRDRYDSLFDYWGQGTTLTVSS

SEQ ID NO: 613 - protein, 121 aa, synthetic construct
  REGION 1..121: note = Synthetic
EMQLVESGGGFVKPGGSLKLSCAASGFAFSHYDMSWVRQTPKQRLEWVAYIASGGDITYYADTVKGRFTISRDNAQNTLYLQMSSLKSEDTAMFYCSRSSYGNNGDALDFWGQGTSVTVSS

SEQ ID NO: 614 - protein, 119 aa, synthetic construct
  REGION 1..119: note = Synthetic
QVQLVESGGGLVQPGGSLRLSCAASGFTFSSYAMGWVRQAPGKGLEWVSSISGSSRYIYYADSVKGRFTISRDNSKNTLYLQMNSLRAEDTAVYYCAKMDASGSYFNFWGQGTLVTVSS

SEQ ID NO: 615 - protein, 115 aa, synthetic construct
  REGION 1..115: note = Synthetic
QVQLLQSAAEVKKPGESLKISCKGSGYSFTSYWIGWVRQMPGKGLEWMGIIYPGDSDTRYSPSFQGQVTISADKSISTAYLQWSSLKASDTAVYYCARWRDSPLWGQGTLVTVSS

SEQ ID NO: 616 - protein, 120 aa, synthetic construct [sequence omitted]

SEQ ID NO: 617 - protein, 120 aa, synthetic construct
  REGION 1..120: note = Synthetic
QVQLQQSGPELVKPGASLKLSCTASGFNIKDTYIHWVKQRPEQGLEWIGRIYPTNGYTRYDPKFQDKATITADTSSNTAYLQVSRLTSEDTAVYYCSRWGGDGFYAMDYWGQGASVTVSS

SEQ ID NO: 618 - protein, 119 aa, synthetic construct
  REGION 1..119: note = Synthetic
QVQLVESGGGLVQPGGSLRLSCAASGFTFRSYAMSWVRQAPGKGLEWVSAISGRGDNTYYADSVKGRFTISRDNSKNTLYLQMNSLRAEDTAVYYCAKMTSNAFAFDYWGQGTLVTVSS

SEQ ID NO: 619 - protein, 119 aa, synthetic construct [sequence omitted]

SEQ ID NO: 620 - protein, 119 aa, synthetic construct [sequence omitted]

SEQ ID NO: 621 - protein, 121 aa, synthetic construct [sequence omitted]

SEQ ID NO: 622 - protein, 118 aa, synthetic construct
  REGION 1..118: note = Synthetic
QVQLQESGGGLVKPGGSLRLSCAASGFTFSSYWMSWVRQAPGKGLEWVANINRDGSASYYVDSVKGRFTISRDDAKNSLYLQMNSLRAEDTAVYYCARDRGVGYFDLWGRGTLVTVSS

SEQ ID NO: 623 - protein, 129 aa, synthetic construct
  REGION 1..129: note = Synthetic
QVQLVQSGAEVKKPGESLKISCKGSGYSFTSYWIAWVRQMPGKGLEYMGLIYPGDSDTKYSPSFQGQVTISVDKSVSTAYLQWSSLKPSDSAVYFCARHDVGYCTDRTCAKWPEWLGVWGQGTLVTVSS

SEQ ID NO: 624 - protein, 119 aa, synthetic construct
  REGION 1..119: note = Synthetic
EVQLVESGGGVVQPGRSLRLSCSTSGFTFSDYYMYWVRQAPGKGLEWVAYMSNVGAITDYPDTVKGRFTISRDNSKNTLFLQMDSLRPEDTGVYFCARGTRDGSWFAYWGQGTPVTVSS

SEQ ID NO: 625 - protein, 120 aa, synthetic construct
  REGION 1..120: note = Synthetic
QVELVQSGAEVKKPGESLKISCKGSGYSFTSYWIGWVRQAPGKGLEWMGIIDPGDSRTRYSPSFQGQVTISADKSISTAYLQWSSLKASDTAMYYCARGQLYGGTYMDGWGQGTLVTVSS

SEQ ID NO: 626 - protein, 119 aa, synthetic construct
  REGION 1..119: note = Synthetic
QVQLQQSGPELEKPGASVKISCKASGYSFTGYTMNWVKQSHGKSLEWIGLITPYNGASSYNQKFRGKATLTVDKSSSTAYMDLLSLTSEDSAVYFCARGGYDGRGFDYWGQGTTVTVSS

SEQ ID NO: 627 - protein, 122 aa, synthetic construct
  REGION 1..122: note = Synthetic
QVYLVESGGGVVQPGRSLRLSCAASGITFSIYGMHWVRQAPGKGLEWVAVIWYDGSHEYYADSVKGRFTISRDNSKNTLYLLMNSLRAEDTAVYYCARDGDYYDSGSPLDYWGQGTLVTVSS

SEQ ID NO: 628 - protein, 122 aa, synthetic construct
  REGION 1..122: note = Synthetic
QVHLVESGGGVVQPGRSLRLSCVASGITFRIYGMHWVRQAPGKGLEWVAVLWYDGSHEYYADSVKGRFTISRDNSKNTLYLQMNSLRAEDTAIYYCARDGDYYDSGSPLDYWGQGTLVTVSS

SEQ ID NO: 629 - protein, 131 aa, synthetic construct
  REGION 1..131: note = Synthetic
EVHLVESGGGLVQPGGSLRLSCAASGFTFSRYWMSWVRQAQGKGLEWVASIKQAGSEKTYVDSVKGRFTISRDNAKNSLSLQMNSLRAEDTAVYYCAREGAYYYDSASYYPYYYYYSMDVWGQGTTVTVSS

SEQ ID NO: 630 - protein, 119 aa, synthetic construct
  REGION 1..119: note = Synthetic
QVQLQQSGPELEKPGASVKISCKASGYSFTGYTMNWVKQSHGKSLEWIGLITPYNGASSYNQKFRGKATLTVDKSSSTAYMDLLSLTSEDSAVYFCARGGYDGRGFDYWGSGTPVTVSS

SEQ ID NO: 631 - protein, 119 aa, synthetic construct
  REGION 1..119: note = Synthetic
EVQLQESGPELVKPGASVKMSCKASGYTFPSYVLHWVKQKPGQGLEWIGYINPYNDGTQYNEKFKGKATLTSDKSSSTAYMELSRLTSEDSAVYYCARGFGGSYGFAYWGQGTLITVSA

SEQ ID NO: 632 - protein, 119 aa, synthetic construct
  REGION 1..119: note = Synthetic
QVQLQQSGAEVKKFGASVKVSCEASGYTFPSYVLHWVKQAPGQGLEWIGYINPYNDGTQTNKKFKGKATLTRDTSINTAYMELSRLRSDDTAVYYCARGFGGSYGFAYNGQGTLVTVSS

SEQ ID NO: 633 - protein, 118 aa, synthetic construct
  REGION 1..118: note = Synthetic
QVQLQQSGAELMKPGASVKISCKATGYTFSAYWIEWVKQRPGHGLEWIGEILPGSNNSRYNEKFKGKATFTADTSSNTAYMQLSSLTSEDSAVYYCSRSYDFAWFAYWGQGTPVTVSA

SEQ ID NO: 634 - protein, 118 aa, synthetic construct
  REGION 1..118: note = Synthetic
QVQLVQSGAEVKKPGASVKVSCKASGYTFSAYWIEWVRQAPGKGLEWVGEILPGSNNSRYNEKFKGRVTVTRDTSTNTAYMELSSLRSEDTAVYYCARSYDFAWFAYWGQGTLVTVSS

SEQ ID NO: 635 - protein, 123 aa, synthetic construct
  REGION 1..123: note = Synthetic
QVQLVQSGAEVKKPGSSVKVSCKTSGDTFSTYAISWVRQAPGQGLEWMGGIIPIFGKAHYAQKFQGRVTITADESTSTAYMELSSLRSEDTAVYFCARKFHFVSGSPFGMDVWGQGTTVTVSS

SEQ ID NO: 636 - protein, 121 aa, synthetic construct
  REGION 1..121: note = Synthetic
EVQLVESGGGLVQPGGSLRLSCAASGFTFSRYWMSWVRQAPGKGLEWVANIKQDGSEKYYVDSVKGRFTISRDNAKNSLYLQMNSLRAEDTAVYYCAREGGWFGELAFDYWGQGTLVTVSS

SEQ ID NO: 637 - protein, 118 aa, synthetic construct [sequence omitted]

SEQ ID NO: 638 - protein, 120 aa, synthetic construct
  REGION 1..120: note = Synthetic
EVQLLESGGGLVQPGGSLRLSCAASGFTFSSYIMMWVRQAPGKGLEWVSSIYPSGGITFYADTVKGRFTISRDNSKNTLYLQMNSLRAEDTAVYYCARIKLGTVTTVDYWGQGTLVTVSS

SEQ ID NO: 639 - protein, 115 aa, synthetic construct
  REGION 1..115: note = Synthetic
EVQLVQSGPEVKKPGATVKISCKTSGYTFTEYTIHWVKQAPGKGLEWIGNINPNNGGTTYNQKFEDKATLTVDKSTDTAYMELSSLRSEDTAVYYCAAGWNFDYWGQGTLLTVSS

SEQ ID NO: 640 - protein, 121 aa, synthetic construct
  REGION 1..121: note = Synthetic
QVQLVESGGGLVKPGESLRLSCAASGFTFSDYYMYWVRQAPGKGLEWVAIISDGGYYTYYSDIIKGRFTISRDNAKNSLYLQMNSLKAEDTAVYYCARGFPLLRHGAMDYWGQGTLVTVSS

SEQ ID NO: 641 - protein, 121 aa, synthetic construct
  REGION 1..121: note = Synthetic
QEQLVESGGRLVTPGGSLTLSCKASGFDFSAYYMSWVRQAPGKGLEWIATIYPSSGKTYYATWVNGRFTISSDNAQNTVDLQMNSLTAADRATYFCARDSYADDGALFNIWGPGTLVTISS

SEQ ID NO: 642 - protein, 119 aa, synthetic construct
  REGION 1..119: note = Synthetic
EVKLVESGGGLVKPGGSLKLSCAASGFTFSSYAMSWVRQIPEKRLEWVASISRGGTTYYPDSVKGRFTISRDNVRNILYLQMSSLRSEDTAMYYCGRYDYDGYYAMDYWGQGTSVTVSS

SEQ ID NO: 643 - protein, 117 aa, synthetic construct
  REGION 1..117: note = Synthetic
QSLEESGGRLVTPGTPLTLTCTVSGIDLNSHWMSWVRQAPGKGLEWIGIIAASGSTYYANWAKGRFTISKTSTTVDLRIASPTTEDTATYFCARDYGDYRLVTFNIWGPGTLVTVSS

SEQ ID NO: 644 - protein, 116 aa, synthetic construct
  REGION 1..116: note = Synthetic
QSVKESEGDLVTPAGNLTLTCTASGSDINDYPISWVRQAPGKGLEWIGFINSGGSTWYASWVKGRFTISRTSTTVDLKMTSLTTDDTATYFCARGYSTYYCDFNIWGPGTLVTISS

SEQ ID NO: 645 - protein, 115 aa, synthetic construct
  REGION 1..115: note = Synthetic
QVQLVQSGAEVVKPGASVKISCKASGYTFTDHAIHWVKQNPGQRLEWIGYFSPGNDDFKYNERFKGKATLTADTSASTAYVELSSLRSEDTAVYFCTRSLNMAYWGQGTLVTVSS

SEQ ID NO: 646 - protein, 119 aa, synthetic construct
  REGION 1..119: note = Synthetic
  SITE 68: note = MISC_FEATURE - X is any amino acid
QIQLVQSGPELKKPGETVKISCKASGYTFTNFGMNWVKQGPGEGLKWMGWINTNTGEPRYAEEFKGRXAFSLETTASTAYLQINNLKNEDTATYFCARDWDGAYFFDYWGQGTTLTVSS

SEQ ID NO: 647 - protein, 117 aa, synthetic construct
  REGION 1..117: note = Synthetic
QVQLQQSRPELVKPGASVKMSCKASGYTFTDYVISWVKQRTGQGLEWIGEIYPGSNSIYYNEKFKGRATLTADKSSSTAYMQLSSLTSEDSAVYFCAMGGNYGFDYWGQGTTLTVSS

SEQ ID NO: 648 - protein, 122 aa, synthetic construct
  REGION 1..122: note = Synthetic
  SITE 97: note = MISC_FEATURE - X is any amino acid
EVQLVESGGGLVQPKGSLKLSCAASGFTFNTYAMNWVRQAPGKGLEWVARIRSKSNNYATYYADSVKDRFTISRDDSQSMLYLQMNNLKTEDTAMYXCVRQWDYDVRAMNYWGQGTSVTVSS

SEQ ID NO: 649 - protein, 121 aa, synthetic construct
  REGION 1..121: note = Synthetic
QVQLQQSGSELKKPGASVKVSCKASGYTFTNYGMNWVKQAPGQGLKWMGWINTYTGEPTYTDDFKGRFAFSLDTSVSTAYLQISSLKADDTAVYFCARGGFGSSYWYFDVWGQGSLVTVSS

SEQ ID NO: 650 - protein, 126 aa, synthetic construct
  REGION 1..126: note = Synthetic
QAQVVESGGGVVQSGRSLRLSCAASGFAFSSYGMHWVRQAPGKGLEWVAVIWYDGSNKYYADSVRGRFTISRDNSENTLYLQMNSLRAEDTAVYYCARDHYGSGVHHYFYYGLDVWGQGTTVTVSS

SEQ ID NO: 651 - protein, 117 aa, synthetic construct
  REGION 1..117: note = Synthetic
EVQLVQSGGGLVKPGGSLRLSCAASGFTFSSYSMNWVRQAPGKGLEWVSSISSSSSYIYYADSVKGRFTISRDNAKNSLYLQMNSLRAEDTAVYYCARVTDAFDIWGQGTMVTVSSA

SEQ ID NO: 652 - protein, 117 aa, synthetic construct
  REGION 1..117: note = Synthetic
EVQLVESGGGLVQPGGSLRLSCAASGFTFSSYGMSWVRQAPGKGLEWVATITSGGSYTYYVDSVKGRFTISRDNAKNTLYLQMNSLRAEDTAVYYCVRIGEDALDYWGQGTLVTVSS

SEQ ID NO: 653 - protein, 118 aa, synthetic construct
  REGION 1..118: note = Synthetic
KVQLQQSGTELVKPGASVKVSCKASGYIFTEYIIHWVKQRSGQGLEWIGWLYPESNIIKYNEKFKDKATLTADKSSSTVYMELSRLTSEDSAVYFCTRHDGTNFDYWGQGTTLTVSSA

SEQ ID NO: 654 - protein, 106 aa, synthetic construct [sequence omitted]

SEQ ID NO: 655 - protein, 107 aa, synthetic construct
  REGION 1..107: note = Synthetic
EIVLTQSPGTLSLSPGERATLSCRASQSVSSTYLAWYQQKPGQAPRLLIYGASSRATGIPDRFSGSGSGTDFTLTISRLEPEDFAVYYCQHYDNSQTFGQGTKVEIK

SEQ ID NO: 656 - protein, 106 aa, synthetic construct
  REGION 1..106: note = Synthetic
ENVLTQSPSSMSASVGDRVNIACSASSSVSYMHWFQQKPGKSPKLWIYSTSNLASGVPSRFSGSGSGTDYSLTISSMQPEDAATYYCQQRSSYPLTFGGGTKLEIK

SEQ ID NO: 657 - protein, 111 aa, synthetic construct
  REGION 1..111: note = Synthetic
DIQLTQSPSSLSASVGDRVTITCRAGESVDIFGVGFLHWYQQKPGKAPKLLIYRASNLESGVPSRFSGSGSRTDFTLTISSLQPEDFATYYCQQTNEDPYTFGQGTKVEIK

SEQ ID NO: 658 - protein, 111 aa, synthetic construct; identical to SEQ ID NO: 657
  REGION 1..111: note = Synthetic

SEQ ID NO: 659 - protein, 106 aa, synthetic construct
  REGION 1..106: note = Synthetic
DIQLTQSPSSLSASVGDRVTITCKASQDVGTSVAWYQQKPGKAPKLLIYWTSTRHTGVPSRFSGSGSGTDFTFTISSLQPEDIATYYCQQYSLYRSFGQGTKVEIK

SEQ ID NO: 660 - protein, 107 aa, synthetic construct
  REGION 1..107: note = Synthetic
QTVLSQSPAILSASPGEKVTMTCRASSSVTYIHWYQQKPGSSPKSWIYATSNLASGVPARFSGSGSGTSYSLTISRVEAEDAATYYCQHWSSKPPTFGGGTKLEIKR

SEQ ID NO: 661 - protein, 116 aa, synthetic construct
  REGION 1..116: note = Synthetic
QAVLTQPASLSASPGASASLTCTLRRGINVGAYSIYWYQQKPGSPPQYLLRYKSDSDKQQGSGVSSRFSASKDASANAGILLISGLQSEDEADYYCMIWHSGASAVFGGGTKLTVL

SEQ ID NO: 662 - protein, 111 aa, synthetic construct
  REGION 1..111: note = Synthetic
DIQLTQSPASLAVSLGQRATISCKASQSVDYDGDSYLNWYQQIPGQPPKLLIYDASNLVSGIPPRFSGSGSGTDFTLNIHPVEKVDAATYHCQQSTEDPWTFGGGTKLEIK

SEQ ID NO: 663 - protein, 107 aa, synthetic construct
  REGION 1..107: note = Synthetic
EIVLTQSPATLSLSPGERATLSCRASQSVSSYLAWYQQKPGQAPRLLIYDASNRATGIPARFSGSGSGTDFTLTISSLEPEDFAVYYCQQRSNWPITFGQGTRLEIK

SEQ ID NO: 664 - protein, 106 aa, synthetic construct [sequence omitted]

SEQ ID NO: 665 - protein, 112 aa, synthetic construct
  REGION 1..112: note = Synthetic
DIVMTQTPLSLPVTPGEPASISCRSSKSLLHSNGITYLYWYLQKPGQSPQLLIYQMSNLVSGVPDRFSGSGSGTDFTLKISRVEAEDVGVYYCAQNLELPYTFGGGTKVEIK

SEQ ID NO: 666 - protein, 106 aa, synthetic construct [sequence omitted]

SEQ ID NO: 667 - protein, 106 aa, synthetic construct [sequence omitted]

SEQ ID NO: 668 - protein, 106 aa, synthetic construct [sequence omitted]

SEQ ID NO: 669 - protein, 111 aa, synthetic construct [sequence omitted]

SEQ ID NO: 670 - protein, 107 aa, synthetic construct [sequence omitted]

SEQ ID NO: 671 - protein, 111 aa, synthetic construct
  REGION 1..111: note = Synthetic
DIVLTQSPASLAVSLGQRATISCRASKSVSTSGYSFMHWYQQKPGQPPKLLIYLASNLESGVPARFSGSGSGTDFTLNIHPVEEEDAATYYCQHSREVPWTFGGGTKLEIK

SEQ ID NO: 672 - protein, 111 aa, synthetic construct
  REGION 1..111: note = Synthetic
DIVLTQSPASLTVSLGQKTTISCRASKSVSTSGYSFMHWYQLKPGQSPKLLIYLASDLPSGVPARFSGSGSGTDFTLKIHPVEEEDAATYYCQHSREIPYTFGGGTKLEIT

SEQ ID NO: 673 - protein, 107 aa, synthetic construct
  REGION 1..107: note = Synthetic
EIVLTQSPATLSLSPGERATLSCRASQSVSSYLAWYQQKPGQAPRLLIYDASNRATGIPARFSGSGSGTDFTLTISSLEPEDFAVYYCQQRTNWPLTFGGGTKVEIK

SEQ ID NO: 674 - protein, 107 aa, synthetic construct
  REGION 1..107: note = Synthetic
AIQLTQSPSSLSASVGDRVTITCRASQGISSALAWYQQKPGKAPKFLIYDASSLESGVPSRFSGSGSGTDFTLTISSLQPEDFATYYCQQFNSYPFTFGPGTKVDIK

SEQ ID NO: 675 - protein, 107 aa, synthetic construct
  REGION 1..107: note = Synthetic
DIQMTQSPSSLSASVGDRVTITCRASQGISSWLAWYQQKPEKAPKSLIYAASSLQSGVPSRFSGSGSGTDFTLTISSLQPEDFATYYCQQYNSYPLTFGGGTKVEIK

SEQ ID NO: 676 - protein, 107 aa, synthetic construct; identical to SEQ ID NO: 675
  REGION 1..107: note = Synthetic

SEQ ID NO: 677 - protein, 107 aa, synthetic construct
  REGION 1..107: note = Synthetic
EIVLTQSPATLSLSPGERATLSCRASQSVSSYLAWYQQKPGQAPRLLIFDASNRATGIPARFSGSGSGTDFTLTISSLEPEDFAVYYCQQRSNWPLTFGGGTKVEIK

SEQ ID NO: 678 - protein, 107 aa, synthetic construct
  REGION 1..107: note = Synthetic
DIQMTQSPSSVSASVGDRVTITCRASQGINTWLAWYQQKPGKAPKLLIYAASSLKSGVPSRFSGSGSGTDFTLTISSLQPEDFATYYCQQANSFPLTFGGGTKVEIK

SEQ ID NO: 679 - protein, 108 aa, synthetic construct [sequence omitted]

SEQ ID NO: 680 - protein, 113 aa, synthetic construct [sequence omitted]

SEQ ID NO: 681 - protein, 107 aa, synthetic construct
  REGION 1..107: note = Synthetic
DIQMTQSPSSLSASVGDRVTITCRASQSINSYLDWYQQKPGKAPKLLIYAASSLQSGVPSRFSGSGSGTDFTLTISSLQPEDFATYYCQQYYSTPFTFGPGTKVEIK

SEQ ID NO: 682 - protein, 108 aa, synthetic construct
  REGION 1..108: note = Synthetic
EIVLTQSPGTLSLSPGERATLSCRASQSVGSSYLAWYQQKPGQAPRLLIYGAFSRATGIPDRFSGSGSGTDFTLTISRLEPEDFAVYYCQQYGSSPWTFGQGTKVEIK

SEQ ID NO: 683 - protein, 107 aa, synthetic construct
  REGION 1..107: note = Synthetic
EIVLTQSPDFQSVTPKEKVTITCRASQSIGISLHWYQQKPDQSPKLLIKYASQSFSGVPSRFSGSGSGTDFTLTINSLEAEDAATYYCHQSRSFPWTFGQGTKVEIK

SEQ ID NO: 684 - protein, 113 aa, synthetic construct
  REGION 1..113: note = Synthetic
ELVMTQSPSSLTVTAGEKVTMSCKSSQSLLNSGNQKNYLTWYQQKPGQPPKLLIYWASTRESGVPDRFTGSGSGTDFTLTISSVQAEDLAVYYCQNDYSYPLTFGAGTKLEIK

SEQ ID NO: 685 - protein, 107 aa, synthetic construct
  REGION 1..107: note = Synthetic
ELQMTQSPSSLSASVGDRVTITCRTSQSISSYLNWYQQKPGQPPKLLIYWASTRESGVPDRFSGSGSGTDFTLTISSLQPEDSATYYCQQSYDIPYTFGQGTKLEIK

SEQ ID NO: 686 - protein, 107 aa, synthetic construct
  REGION 1..107: note = Synthetic
NIVMTQSPKSMSMSVGERVTLTCKASENVVTYVSWYQQKPEQSPKLLIYGASNRYTGVPDRFTGSGSATDFTLTISSVQAEDLADYHCGQGYSYPYTFGGGTKLEIK

SEQ ID NO: 687 - protein, 106 aa, synthetic construct
  REGION 1..106: note = Synthetic
QILLTQSPAIMSASPGEKVTMTCSASSSVSYMLWYQQKPGSSPKPWIFDTSNLASGFPARFSGSGSGTSYSLIISSMEAEDAATYYCHQRSGYPYTFGGGTKLEIK

SEQ ID NO: 688 - protein, 113 aa, synthetic construct
  REGION 1..113: note = Synthetic
DIVMTQSPDSLAVSLGERATINCKSSQSVLYSSNNKNYLAWYQQKPGQPPKLLIYWASTRESGVPDRFSGSGSGTDFTLTISSLQAEDVAVYYCQQYYSYPLTFGGGTKVKES

SEQ ID NO: 689 - protein, 112 aa, synthetic construct
  REGION 1..112: note = Synthetic
DIVMTQSPLSLPVTPGEPASISCRSSINKKGSNGITYLYWYLQKPGQSPQLLIYQMSNLASGVPDRFSGSGSGTDFTLKISRVEAEDVGVYYCAQNLEIPRTFGQGTKVEIK

SEQ ID NO: 690 - protein, 112 aa, synthetic construct
  REGION 1..112: note = Synthetic
DIQMTQSPSSLSASVGDRVTITCRSTKSLLHSNGITYLYWYQQKPGKAPKLLIYQMSNLASGVPSRFSSSGSGTDFTLTISSLQPEDFATYYCAQNLEIPRTFGQGTKVEIK

SEQ ID NO: 691 - protein, 112 aa, synthetic construct
  REGION 1..112: note = Synthetic
DIQMTQSPSSLSASVGDRVTITCRSTKSLLHSNGITYLYWYQQKPGKAPKLLIYQMSNLASGVPSRFSSSGSGTDFTLTISSLQPEDFATYYCAQNLEIPRTFGQGTKVELK

SEQ ID NO: 692 - protein, 107 aa, synthetic construct
  REGION 1..107: note = Synthetic
DIQMTQSPSSLSASVGDRVTITCRASQSISTWLAWYQQKPGKAPKLLIYKASNLHTGVPSRFSGSGSGTEFSLTISGLQPDDFATYYCQQYNSYSRTFGQGTKVEIK

SEQ ID NO: 693 - protein, 110 aa, synthetic construct
  REGION 1..110: note = Synthetic
DIQLTQSPSSLSASVGDRVTITCSVSSSISSNNLHWYQQKPGKAPKPWIYGTSNLASGVPSRFSGSGSGTDYTFTISSLQPEDIATYYCQQWSSYPYMYTFGQGTKVEIK

SEQ ID NO: 694 - protein, 111 aa, synthetic construct
  REGION 1..111: note = Synthetic
DIVLTQSPLSLAVSLGQPAIISCKASQSVSFAGTSLMHWYHQKPGQQPRLLIYRASNLEAGVPDRFSGSGSKTDFTLNISPVEAEDAATYYCQQSREYPYTFGGGTKLEIK

SEQ ID NO: 695 - protein, 111 aa, synthetic construct
  REGION 1..111: note = Synthetic
DIVLTQSPLSLAVSLGQPAIISCKASQSVSFAGTSLMHWYHQKPGQQPRLLIYRASNLEAGVPDRFSGSGSKTDFTLTISPVEAEDAATYYCQQSREYPYTFGGGTKLEIK

SEQ ID NO: 696 - protein, 100 aa, synthetic construct
  REGION 1..100: note = Synthetic
PASLSASVGETVTITCRTSENIFSYLAWYQQKQGISPQLLVYNAKTLAEGVPSRFSGSGSGTQFSLKINSLQPEDFGSYYCQHHYAFPWTFGGGSKLEIK

SEQ ID NO: 697 - protein, 112 aa, synthetic construct
  REGION 1..112: note = Synthetic
DVVMTQSPLSLPVTPGEPASISCRSSQSLVHSNGNTYLHWYLQKPGQSPQLLIYKVSNRFSGVPDRFSGSGSGTDFTLKISRVEAEDVGVYYCSQNTHVPPTFGQGTKLEIK

SEQ ID NO: 698 - protein, 107 aa, synthetic construct
  REGION 1..107: note = Synthetic
EIVLTQSPGTLSLSPGERATLSCRAVQSVSSSYLAWYQQKPGQAPRLLIYGASSRATGIPDRFSGSGSGTDFTLTISRLEPEDFAVYYCQQYGSSPTFGGGTKVEIK

SEQ ID NO: 699 - protein, 107 aa, synthetic construct
  REGION 1..107: note = Synthetic
EIVLTQSPGTLSLSPGERATLSCRASQSVSSSYLAWYQQKPGQAPRLLIYGASSRATGIPDRFSGSGSGTDFTLTISRLEPEDFAVYYCQQYGSSPTFGGGTKVEIK

SEQ ID NO: 700 - protein, 107 aa, synthetic construct
  REGION 1..107: note = Synthetic
EILLTQSPGTLSLSPGERATLSCRASQSVSSSYLAWYQQKPGQAPRLLIYGASSRATGIPDRFSGSGSGTDFTLTISRLEPEDFAVYYCQQYGSSPTFGQGTKVEIK

SEQ ID NO: 701 - protein, 112 aa, synthetic construct
  REGION 1..112: note = Synthetic
DTVMTQTPLSSHVTLGQPASISCRSSQSLVHSDGNTYLSWLQQRPGQPPRLLIYRISRRFSGVPDRFSGSGAGTDFTLEISRVEAEDVGVYYCMQSTHVPRTFGQGTKVEIK

SEQ ID NO: 702 - protein, 107 aa, synthetic construct
  REGION 1..107: note = Synthetic
DILLTQSPVILSVSPGERVSFSCRASQSIGTNIHWYQQRTNGSPRLLIKYASESISGIPSRFSGSGSGTDFTLSINSVESEDIADYYCQQNNNWPTTFGAGTKLELK

SEQ ID NO: 703 - protein, 106 aa, synthetic construct [sequence omitted]

SEQ ID NO: 704 - protein, 107 aa, synthetic construct [sequence omitted]

SEQ ID NO: 705 - protein, 107 aa, synthetic construct [sequence omitted]

SEQ ID NO: 706 - protein, 107 aa, synthetic construct
  REGION 1..107: note = Synthetic
DIQMTQSPSTLSASVGDRVTITCRASQSISSWWAWYQQKPGKAPKLLIYDASSLESGVPSRFSGSGSGTEFTLTISSLQPDDFATYYCQQYHAHPTTFGGGTKVEIK

SEQ ID NO: 707 - protein, 113 aa, synthetic construct
  REGION 1..113: note = Synthetic
DIVMTQSPDSLAVSLGERATINCKSSQSVLYSPNNKNYLAWYQQKPGQPPKLLIYWASTRESGVPDRFSGSGSGTDFTLTISSLQAEDVAVYYCQQYYGSPITFGGGTKVEIK

SEQ ID NO: 708 - protein, 108 aa, synthetic construct
  REGION 1..108: note = Synthetic
EIVMTQSPATLSVSPGERATLSCRASQSVSSNLAWYQQKPGQAPRLLIYGASTRATGIPARFSGSGSGTEFTLTISSLQSEDFAVYYCQDYRTWPRRVFGGGTKVEIK

SEQ ID NO: 709 - protein, 112 aa, synthetic construct [sequence omitted]

SEQ ID NO: 710 - protein, 107 aa, synthetic construct [sequence omitted]

SEQ ID NO: 711 - protein, 112 aa, synthetic construct
  REGION 1..112: note = Synthetic
DVVMTQTPLSLPVSLGDQASISCRSSQSLVHSNGNTYLHWYLQKPGQSPKLLIYKVSNRFSGVPDRFSGSGSGTDFTLKISRVEAEDLGVYFCSQSTHVPWTFGGGTKLEIK

SEQ ID NO: 712 - protein, 111 aa, synthetic construct
  REGION 1..111: note = Synthetic
DVVMTQTPLSLPVSLGDQASISCRSSQSLVHSNGNTYLHWYLQKPGQSPKLLIYKVSNRFSGVPDRFSGSGSGTDFTLKISRVEAEDLGVYFCSQSTHVLTFGSGTKLEIK

SEQ ID NO: 713 - protein, 102 aa, synthetic construct
  REGION 1..102: note = Synthetic
QSPSFLSAFVGDRITITCRASPGIRNYLAWYQQKPGKAPKLLIYAASTLQSGVPSRFSGSGSGTDFTLTISSLQPEDFATYYCQQYNSYPLSFGGGTKVEIK

SEQ ID NO: 714 - protein, 110 aa, synthetic construct
  REGION 1..110: note = Synthetic
QAVVTQEPSFSVSPGGTVTLTCGLSSGSVSTSYYPSWYQQTPGQAPRTLIYSTNTRSSGVPDRFSGSILGNKAALTITGAQADDESDYYCVLYMGSGQYVFGGGTKLTVL

SEQ ID NO: 715 - protein, 107 aa, synthetic construct [sequence omitted]

SEQ ID NO: 716 - protein, 107 aa, synthetic construct
  REGION 1..107: note = Synthetic
DIVMTQSHKFMSTSVGDRVSITCKASQDVNTAVAWYQQKPGHSPKLLIYSASFRYTGVPDRFTGSRSGTDFTFTISSVQAEDLAVYYCQQHYTTPPTFGGGTKVEIK

SEQ ID NO: 717 - protein, 111 aa, synthetic construct
  REGION 1..111: note = Synthetic
QSVLTQPPSVSGAPGQRVTISCTGSSSNIGAGYGVHWYQQLPGTAPKLLIYGNTNRPSGVPDRFSGFKSGTSASLAITGLQAEDEADYYCQFYDSSLSGWVFGGGTKLTVL

SEQ ID NO: 718 - protein, 107 aa, synthetic construct [sequence omitted]

SEQ ID NO: 719 - protein, 111 aa, synthetic construct [sequence omitted]

SEQ ID NO: 720 - protein, 107 aa, synthetic construct [sequence omitted]

SEQ ID NO: 721 - protein, 111 aa, synthetic construct
  REGION 1..111: note = Synthetic
QSALTQPASVSGSPGQSITISCTGTSSDVGGYNFVSWYQQHPGKAPKLMIYDVSDRPSGVSDRFSGSKSGNTASLIISGLQADDEADYYCSSYGSSSTHVIFGGGTKVTVL

SEQ ID NO: 722 - protein, 110 aa, synthetic construct
  REGION 1..110: note = Synthetic
QSVLTQPPSVSAAPGQKVTISCSGSSSNIGNNYVSWYQQLPGTAPKLLIYDHTNRPAGVPDRFSGSKSGTSASLAISGFRSEDEADYYCASWDYTLSGWVFGGGTKLTVL

SEQ ID NO: 723 - protein, 112 aa, synthetic construct
  REGION 1..112: note = Synthetic
DIQMTQSPSSLSASVGDRVTITCRSSQRIVHSNGNTYLEWYQQTPGKAPKLLIYKVSNRFSGVPSRFSGSGSGTDFTFTISSLQPEDIATYYCFQGSHVPFTFGQGTKLQIT

SEQ ID NO: 724 - protein, 111 aa, synthetic construct
  REGION 1..111: note = Synthetic
DIALTQPASVSGSPGQSITISCTGTSSDIGGYNSVSWYQQHPGKAPKLMIYGVNNRPSGVSNRFSGSKSGNTASLTISGLQAEDEADYYCSSYDIESATPVFGGGTKLTVL

SEQ ID NO: 725 - protein, 106 aa, synthetic construct
  REGION 1..106: note = Synthetic
DIELTQSPAIMSASPGEKVTMTCSASSSVSYMHWYQQKSGTSPKRWIYDTSKLASGVPGRFSGSGSGNSYSLTISSVEAEDDATYYCQQWSGYPLTFGAGTKLEIK

SEQ ID NO: 726 - protein, 107 aa, synthetic construct
  REGION 1..107: note = Synthetic
EIVLTQSPATLSLSPGERATLSCRASQSVSSYLAWYQQKPGQAPRLLIYDASNRATGIPARFSGSGSGTDFTLTISSLEPEDFAVYYCQQRSNWPLTFGGGTKVEIK

SEQ ID NO: 727 - protein, 107 aa, synthetic construct; identical to SEQ ID NO: 726
  REGION 1..107: note = Synthetic

SEQ ID NO: 728 - protein, 108 aa, synthetic construct
  REGION 1..108: note = Synthetic
EIVLTQSPGTLSLSPGERATLSCRASQSVSSSYLAWYQQKPGQAPRLLIYGASSRATGIPDRFSGSGSGTDFTLTISRLEPEDFAVYYCQQYGSSQYTFGQGTKLEIK

SEQ ID NO: 729 - protein, 106 aa, synthetic construct
  REGION 1..106: note = Synthetic
DIELTQSPAIMSASPGEKVTMTCSASSSVSYMHWYQQKSGTSPKRWIYDTSKLASGVPGRFSGSGSGNSYSLTISSVEAEDDATYYCQQWSKHPLTFGSGTKVEIK

SEQ ID NO: 730 - protein, 108 aa, synthetic construct
  REGION 1..108: note = Synthetic
DIVMTQSPAIMSASPGEKVTMTCSASSSVSSSYLYWYQQKPGSSPKLWIYSTSNLASGVPARFSGSGSGTSYSLTISSMEAEDAASYFCHQWNRYPYTFGGGTKLEIK

SEQ ID NO: 731 - protein, 108 aa, synthetic construct
  REGION 1..108: note = Synthetic
DIQLTQSPSSLSASVGDRVTMTCSASSSVSSSYLYWYQQKPGKAPKLWIYSTSNLASGVPARFSGSGSGTDFTLTISSLQPEDSASYFCHQWNRYPYTFGGGTRLEIK

SEQ ID NO: 732 - protein, 106 aa, synthetic construct
  REGION 1..106: note = Synthetic
EIVLTQSPATMSASPGERVTITCSAHSSVSFMHWFQQKPGTSPKLWIYSTSSLASGVPARFGGSGSGTSYSLTISSMEAEDAATYYCQQRSSFPLTFGAGTKLELK

SEQ ID NO: 733 - protein, 113 aa, synthetic construct
  REGION 1..113: note = Synthetic
DIVMSQSPSSLAVSVGEKVTMSCKSSQSLLYSSNQKIYLAWYQQKPGQSPKLLIYWASTRESGVPDRFTGGGSGTDFTLTISSVKAEDLAVYYCQQYYRYPRTFGGGTKLEIK

SEQ ID NO: 734 - protein, 113 aa, synthetic construct
  REGION 1..113: note = Synthetic
DIQMTQSPSSLSASVGDRVTITCKSSQSLLYSSNQKIYLAWYQQKPGKAPKLLIYWASTRESGVPSRFSGSGSGTDFTFTISSLQPEDIATYYCQQYYRYPRTFGQGTKVEIK

SEQ ID NO: 735 - protein, 106 aa, synthetic construct
  REGION 1..106: note = Synthetic
EIVLTQSPATLSLSPGERATLSCRASQSVSSYLAWYQQKPGQAPRLLIYDASNRATGIPARFSGSGSGTDFTLTISSLEPEDFAVYYCQQRSNWPTFGQGTKVEIK

SEQ ID NO: 736 - protein, 108 aa, synthetic construct
  REGION 1..108: note = Synthetic
EIVLTQSPGTLSLSPGERATLSCRASQRVSSSYLAWYQQKPGQAPRLLIYDASSRATGIPDRFSGSGSGTDFTLTISRLEPEDFAVYYCQQYGSLPWTFGQGTKVEIK

SEQ ID NO: 737 - protein, 107 aa, synthetic construct [sequence omitted]

SEQ ID NO: 738 - protein, 110 aa, synthetic construct
  REGION 1..110: note = Synthetic
QSALTQPASVSGSPGQSITISCTGTSSDVGGYNYVSWYQQHPGKAPKLMIYDVSNRPSGVSNRFSGSKSGNTASLTISGLQAEDEADYYCSSYTSSSTRVFGTGTKVTVL

SEQ ID NO: 739 - protein, 107 aa, synthetic construct
  REGION 1..107: note = Synthetic
DIQMTQSPSSLSTSVGDRVTLTCKASQDVGTAVDWYQQKPGPSPKLLIYWASTRHTGIPSRFSGSGSGTDFTLTISSLQPEDFADYYCQQYNSYPLTFGPGTKVDIK

SEQ ID NO: 740 - protein, 107 aa, synthetic construct
  REGION 1..107: note = Synthetic
DIQMTQSPSSLSASVGDRVTITCKASQNVDTNVAWYQQKPGQAPKSLIYSASYRYSDVPSRFSGSASGTDFTLTISSVQSEDFATYYCQQYDSYPYTFGGGTKLEIK

SEQ ID NO: 741 - protein, 112 aa, synthetic construct
  REGION 1..112: note = Synthetic
ELVLTQSPSVSAALGSPAKITCTLSSAHKTDTIDWYQQLQGEAPRYLMQVQSDGSYTKRPGVPDRFSGSSSGADRYLIIPSVQADDEADYYCGADYIGGYVFGGGTQLTVTG

SEQ ID NO: 742 - protein, 107 aa, synthetic construct
  REGION 1..107: note = Synthetic
DIKMTQSPSSMYASLGERVTITCKASPDINSYLSWFQQKPGKSPKTLIYRANRLVDGVPSRFSGGGSGQDYSLTINSLEYEDMGIYYCLQYDEFPYTFGGGTKLEMK

SEQ ID NO: 743 - protein, 108 aa, synthetic construct
  REGION 1..108: note = Synthetic
ELVMTQTPSSVSAAVGGTVTINCQASQSIGSYLAWYQQKPGQPPKLLIYYASNLASGVPSRFSGSGSGTEYTLTISGVQREDAATYYCLGSLSNSDNVFGGGTELEIL

SEQ ID NO: 744 - protein, 110 aa, synthetic construct
  REGION 1..110: note = Synthetic
ELVMTQTPSSTSGAVGGTVTINCQASQSIDSNLAWFQQKPGQPPTLLIYRASNLASGVPSRFSGSRSGTEYTLTISGVQREDAATYYCLGGVGNVSYRTSFGGGTEVVVK

SEQ ID NO: 745 - protein, 113 aa, synthetic construct
  REGION 1..113: note = Synthetic
DIVMSQSPDSLAVSLGERVTLNCKSSQSLLYSGNQKNYLAWYQQKPGQSPKLLIYWASARESGVPDRFSGSGSGTDFTLTISSVQAEDVAVYYCQQYYSYPLTFGAGTKLELK

SEQ ID NO: 746 - protein, 107 aa, synthetic construct
  REGION 1..107: note = Synthetic
SIVMTQTPKFLLVSAGDRVTITCKASQSVSNDVAWYQQKPGQSPKLLINFATNRYTGVPNRFTGSGYGTDFTFTISTVQAEDLALYFCQQDYSSPWTFGGGTKLEIK

SEQ ID NO: 747 - protein, 115 aa, synthetic construct
  REGION 1..115: note = Synthetic
SVIMSRGQIVLTQSPAIMSASLGERVTLTCTASSSVNSNYLHWYQQKPGSSPKLWIYSTSNLASGVPARFSGSGSGTSYSLTISSMEAEDAATYYCHQYHRSPLTFGAGTKLELK

SEQ ID NO: 748 - protein, 107 aa, synthetic construct
  REGION 1..107: note = Synthetic
DIVMTQSHIFMSTSVGDRVSITCKASQDVDTAVAWYQQKPGQSPKLLIYWASTRLTGVPDRFTGSGSGTDFTLTISNVQSEDLADYFCQQYSSYPYTFGGGTKLEIK

SEQ ID NO: 749 - protein, 107 aa, synthetic construct
  REGION 1..107: note = Synthetic
DIQLTQSPSSLSASVGDRVSITCKASQDVSIAVAWYQQKPGKAPKLLIYSASYRYTGVPDRFSGSGSGTDFTLTISSLQPEDFAVYYCQQHYITPLTFGAGTKVEIK

SEQ ID NO: 750 - protein, 108 aa, synthetic construct
  REGION 1..108: note = Synthetic
EIVLTQSPGTLSLSPGERATLSCRASQSVSSSYLAWYQQKPGQAPRLLIYGASSRATGIPDRFSGSGSGTDFTLTISRLEPEDFAVYYCQQYGSSPLTFGGGTKVEIK

SEQ ID NO: 751 - protein, 107 aa, synthetic construct [sequence omitted]

SEQ ID NO: 752 - protein, 107 aa, synthetic construct
  REGION 1..107: note = Synthetic
DIQMTQSPSSLSASVGDRVTITCRASQDIAGSLNWLQQKPGKAIKRLIYATSSLDSGVPKRFSGSRSGSDYTLTISSLQPEDFATYYCLQYGSFPPTFGQGTKVEIK

SEQ ID NO: 753 - protein, 111 aa, synthetic construct
  REGION 1..111: note = Synthetic
DIVLTQSPASLAVSLGQRATISCRASESVDSYGNSFMHWYQQKPGQPPKLLIYRASNLESGIPARFSGSGSRTDFTLTINPVEADDVATYYCQQSNEDPLTFGAGTKLELK

SEQ ID NO: 754 - protein, 117 aa, synthetic construct
  REGION 1..117: note = Synthetic
QAQLQVSGAEVVKPGASVKMSCKASGYTFTSYNMHWVKQTPGQGLEWIGYIYPGNGATNYNQKFQGKATLTADTSSSTAYMQISSLTSEDSAVYFCARGDSVPFAYWGQGTLVTVSA

SEQ ID NO: 755 - protein, 8 aa, synthetic construct
  REGION 1..8: note = Synthetic
GPPGKNGE

SEQ ID NO: 756 - protein, 8 aa, synthetic construct
  REGION 1..8: note = Synthetic
VENAKTFG

SEQ ID NO: 757 - protein, 8 aa, synthetic construct
  REGION 1..8: note = Synthetic
GAAGVKGD

SEQ ID NO: 758 - protein, 8 aa, synthetic construct
  REGION 1..8: note = Synthetic
SLMKRPPG

SEQ ID NO: 759 - protein, 8 aa, synthetic construct
  REGION 1..8: note = Synthetic
NGFKSHAL

SEQ ID NO: 760 - protein, 8 aa, synthetic construct
  REGION 1..8: note = Synthetic
SLMKRPPG

SEQ ID NO: 761 - protein, 8 aa, synthetic construct
  REGION 1..8: note = Synthetic
THRIHWES

SEQ ID NO: 762 - protein, 8 aa, synthetic construct
  REGION 1..8: note = Synthetic
SSKITHRI

SEQ ID NO: 763 - protein, 8 aa, synthetic construct
  REGION 1..8: note = Synthetic
KSHALQLN

SEQ ID NO: 764 - protein, 8 aa, synthetic construct
  REGION 1..8: note = Synthetic
ITHRIHWE

SEQ ID NO: 765 - protein, 8 aa, synthetic construct
  REGION 1..8: note = Synthetic
FKSHALQL

SEQ ID NO: 766 - protein, 8 aa, synthetic construct
  REGION 1..8: note = Synthetic
RSSKITHR

SEQ ID NO: 767 - protein, 8 aa, synthetic construct
  REGION 1..8: note = Synthetic
PVSAMEPL

SEQ ID NO: 768 - protein, 8 aa, synthetic construct
  REGION 1..8: note = Synthetic
GHTRRHDW

SEQ ID NO: 769 - protein, 8 aa, synthetic construct
  REGION 1..8: note = Synthetic
KITHRIHW

SEQ ID NO: 770 - protein, 8 aa, synthetic construct
  REGION 1..8: note = Synthetic
SRSSKITH

SEQ ID NO: 771 - protein, 8 aa, synthetic construct
  REGION 1..8: note = Synthetic
RQIRGLEE

SEQ ID NO: 772 - protein, 8 aa, synthetic construct
  REGION 1..8: note = Synthetic
NGFKSHAL

SEQ ID NO: 773 - protein, 8 aa, synthetic construct
  REGION 1..8: note = Synthetic
PSRSSKIT

SEQ ID NO: 774 - protein, 8 aa, synthetic construct
  REGION 1..8: note = Synthetic
STGRNGFK

SEQ ID NO: 775 - protein, 8 aa, synthetic construct
  REGION 1..8: note = Synthetic
LPHRRPHF

SEQ ID NO: 776 - protein, 10 aa, synthetic construct
  REGION 1..10: note = Synthetic
NNPVPYWEVQ

SEQ ID NO: 777 - protein, 10 aa, synthetic construct
  REGION 1..10: note = Synthetic
GLPYTTGKLP

SEQ ID NO: 778 - protein, 10 aa, synthetic construct
  REGION 1..10: note = Synthetic
ARPGFGLSPI

SEQ ID NO: 779 - protein, 8 aa, synthetic construct
  REGION 1..8: note = Synthetic
SRGKSSSY

SEQ ID NO: 780 - protein, 8 aa, synthetic construct
  REGION 1..8: note = Synthetic
SRGKSSSY

SEQ ID NO: 781 - protein, 8 aa, synthetic construct
  REGION 1..8: note = Synthetic
DGFRHRHP

SEQ ID NO: 782 - protein, 8 aa, synthetic construct
  REGION 1..8: note = Synthetic
SRGKSSSY

SEQ ID NO: 783 - protein, 8 aa, synthetic construct
  REGION 1..8: note = Synthetic
TAWTADSG

SEQ ID NO: 784 - protein, 8 aa, synthetic construct
  REGION 1..8: note = Synthetic
AWTADSGE

SEQ ID NO: 785 - protein, 8 aa, synthetic construct
  REGION 1..8: note = Synthetic
AWTADSGE

SEQ ID NO: 786 - protein, 8 aa, synthetic construct
  REGION 1..8: note = Synthetic
KNNKDSHS

SEQ ID NO: 787 - protein, 8 aa, synthetic construct
  REGION 1..8: note = Synthetic
WTADSGEG

SEQ ID NO: 788 - protein, 8 aa, synthetic construct
  REGION 1..8: note = Synthetic
GGVRGPRV

SEQ ID NO: 789 - protein, 8 aa, synthetic construct
  REGION 1..8: note = Synthetic
SRGKSSSY

SEQ ID NO: 790 - protein, 8 aa, synthetic construct
  REGION 1..8: note = Synthetic
TAWTADSG

SEQ ID NO: 791 - protein, 8 aa, synthetic construct
  REGION 1..8: note = Synthetic
GNFKSQLQ

SEQ ID NO: 792 - protein, 8 aa, synthetic construct
  REGION 1..8: note = Synthetic
TADSGEGD

SEQ ID NO: 793 - protein, 8 aa, synthetic construct
  REGION 1..8: note = Synthetic
SSGPGSTG

SEQ ID NO: 794 - protein, 8 aa, synthetic construct
  REGION 1..8: note = Synthetic
ADSGEGDF

SEQ ID NO: 795 - protein, 8 aa, synthetic construct
  REGION 1..8: note = Synthetic
SRGKSSSY

SEQ ID NO: 796 - protein, 8 aa, synthetic construct
  REGION 1..8: note = Synthetic
SRGKSSSY

SEQ ID NO: 797 - protein, 8 aa, synthetic construct
  REGION 1..8: note = Synthetic
TAWTADSG

SEQ ID NO: 798 - protein, 8 aa, synthetic construct
  REGION 1..8: note = Synthetic
NFKSQLQK

SEQ ID NO: 799 - protein, 8 aa, synthetic construct
  REGION 1..8: note = Synthetic
KMKPVPDL

SEQ ID NO: 800 - protein, 8 aa, synthetic construct
  REGION 1..8: note = Synthetic
SGEGDFLA

SEQ ID NO: 801 - protein, 8 aa, synthetic construct
  REGION 1..8: note = Synthetic
TAWTADSG

SEQ ID NO: 802 - protein, 8 aa, synthetic construct
  REGION 1..8: note = Synthetic
STGKTFPG

SEQ ID NO: 803 - protein, 8 aa, synthetic construct
  REGION 1..8: note = Synthetic
PLIKMKPV

SEQ ID NO: 804 - protein, 8 aa, synthetic construct
  REGION 1..8: note = Synthetic
PLIKMKPV

SEQ ID NO: 805 - protein, 8 aa, synthetic construct
  REGION 1..8: note = Synthetic
GSWNSGSS

SEQ ID NO: 806 - protein, 8 aa, synthetic construct
  REGION 1..8: note = Synthetic
PLIKMKPV

SEQ ID NO: 807 - protein, 8 aa, synthetic construct
  REGION 1..8: note = Synthetic
GEFVSETE

SEQ ID NO: 808 - protein, 8 aa, synthetic construct
  REGION 1..8: note = Synthetic
AWTADSGE

SEQ ID NO: 809 - protein, 8 aa, synthetic construct
  REGION 1..8: note = Synthetic
KNNKDSHS

SEQ ID NO: 810 - protein, 8 aa, synthetic construct
  REGION 1..8: note = Synthetic
TAWTADSG

SEQ ID NO: 811 - protein, 8 aa, synthetic construct
  REGION 1..8: note = Synthetic
PLIKMKPV

SEQ ID NO: 812 - protein, 8 aa, synthetic construct
  REGION 1..8: note = Synthetic
GQWHSESG

SEQ ID NO: 813 - protein, 8 aa, synthetic construct
  REGION 1..8: note = Synthetic
KMKPVPDL

SEQ ID NO: 814 - protein, 8 aa, synthetic construct
  REGION 1..8: note = Synthetic
MRMELERP

SEQ ID NO: 815 - protein, 8 aa, synthetic construct
  REGION 1..8: note = Synthetic
KPVPDLVP

SEQ ID NO: 816 - protein, 8 aa, synthetic construct
  REGION 1..8: note = Synthetic
PLIKMKPV

SEQ ID NO: 817 - protein, 8 aa, synthetic construct
  REGION 1..8: note = Synthetic
TAWTADSG

SEQ ID NO: 818 - protein, 8 aa, synthetic construct
  REGION 1..8: note = Synthetic
GNFKSQLQ

SEQ ID NO: 819 - protein, 8 aa, synthetic construct
  REGION 1..8: note = Synthetic
RGKSSSYS

SEQ ID NO: 820 - protein, 8 aa, synthetic construct
  REGION 1..8: note = Synthetic
MLGEFVSE

SEQ ID NO: 821 - protein, 8 aa, synthetic construct
  REGION 1..8: note = Synthetic
MRMELERP

SEQ ID NO: 822 - protein, 8 aa, synthetic construct
  REGION 1..8: note = Synthetic
SYSKQFTS

SEQ ID NO: 823 - protein, 8 aa, synthetic construct
  REGION 1..8: note = Synthetic
ESSVSGST

SEQ ID NO: 824 - protein, 8 aa, synthetic construct
  REGION 1..8: note = Synthetic
DGFRHRHP

SEQ ID NO: 825 - protein, 8 aa, synthetic construct
  REGION 1..8: note = Synthetic
PLIKMKPV

SEQ ID NO: 826 - protein, 8 aa, synthetic construct
  REGION 1..8: note = Synthetic
WGTFEEVS

SEQ ID NO: 827 - protein, 8 aa, synthetic construct
  REGION 1..8: note = Synthetic
MRMELERP

SEQ ID NO: 828 - protein, 8 aa, synthetic construct
  REGION 1..8: note = Synthetic
EAAFFDTA

SEQ ID NO: 829 - protein, 8 aa, synthetic construct
  REGION 1..8: note = Synthetic
SRGKSSSY

SEQ ID NO: 830 - protein, 8 aa, synthetic construct
  REGION 1..8: note = Synthetic
PLIKMKPV

SEQ ID NO: 831 - protein, 8 aa, synthetic construct
  REGION 1..8: note = Synthetic
DPQGDAAQ

SEQ ID NO: 832 - protein, 8 aa, synthetic construct
  REGION 1..8: note = Synthetic
FVFLMIEQ

SEQ ID NO: 833 - protein, 8 aa, synthetic construct
  REGION 1..8: note = Synthetic
MFLEAIPM

SEQ ID NO: 834 - protein, 8 aa, synthetic construct
  REGION 1..8: note = Synthetic
IPMSIPPE

SEQ ID NO: 835 - protein, 8 aa, synthetic construct
  REGION 1..8: note = Synthetic
GTEAAGAM

SEQ ID NO: 836 - protein, 8 aa, synthetic construct
  REGION 1..8: note = Synthetic
AIPMSIPP

SEQ ID NO: 837 - protein, 8 aa, synthetic construct
  REGION 1..8: note = Synthetic
PFVFLMIE

SEQ ID NO: 838 - protein, 8 aa, synthetic construct
  REGION 1..8: note = Synthetic
PEVKFNKP

SEQ ID NO: 839 - protein, 8 aa, synthetic construct
  REGION 1..8: note = Synthetic
AMFLEAIP

SEQ ID NO: 840 - protein, 8 aa, synthetic construct
  REGION 1..8: note = Synthetic
VSLAEDPQ

SEQ ID NO: 841 - protein, 8 aa, synthetic construct
  REGION 1..8: note = Synthetic
VFLMIEQN

SEQ ID NO: 842 - protein, 8 aa, synthetic construct
  REGION 1..8: note = Synthetic
AAGAMFLE

SEQ ID NO: 843 - protein, 8 aa, synthetic construct
  REGION 1..8: note = Synthetic
EAIPMSIP

SEQ ID NO: 844 - protein, 8 aa, synthetic construct
  REGION 1..8: note = Synthetic
AGAMFLEA

SEQ ID NO: 845 - protein, 8 aa, synthetic construct
  REGION 1..8: note = Synthetic
DPQGDAAQ

SEQ ID NO: 846 - protein, 8 aa, synthetic construct
  REGION 1..8: note = Synthetic
DEKGTEAA

SEQ ID NO: 847 - protein, 8 aa, synthetic construct
  REGION 1..8: note = Synthetic
EKGTEAAG

SEQ ID NO: 848 - protein, 8 aa, synthetic construct
  REGION 1..8: note = Synthetic
AMFLEAIP

SEQ ID NO: 849 - protein, 8 aa, synthetic construct
  REGION 1..8: note = Synthetic
VSLAEDPQ

SEQ ID NO: 850 - protein, 8 aa, synthetic construct
  REGION 1..8: note = Synthetic
VSLAEDPQ

SEQ ID NO: 851 - protein, 8 aa, synthetic construct
  REGION 1..8: note = Synthetic
KGTEAAGA

SEQ ID NO: 852 - protein, 8 aa, synthetic construct
  REGION 1..8: note = Synthetic
DPQGDAAQ

SEQ ID NO: 853 - protein, 8 aa, synthetic construct
  REGION 1..8: note = Synthetic
TEAAGAMF

SEQ ID NO: 854 - protein, 8 aa, synthetic construct
  REGION 1..8: note = Synthetic
IDEKGTEA

SEQ ID NO: 855 - protein, 8 aa, synthetic construct
  REGION 1..8: note = Synthetic
EAAGAMFL

SEQ ID NO: 856 - protein, 8 aa, synthetic construct
  REGION 1..8: note = Synthetic
VSLAEDPQ

SEQ ID NO: 857 - protein, 8 aa, synthetic construct
  REGION 1..8: note = Synthetic
LAEDPQGD

SEQ ID NO: 858 - protein, 8 aa, synthetic construct
  REGION 1..8: note = Synthetic
LSLQKPRL

SEQ ID NO: 859 - protein, 8 aa, synthetic construct
  REGION 1..8: note = Synthetic
LSLQKPRL

SEQ ID NO: 860 - protein, 8 aa, synthetic construct
  REGION 1..8: note = Synthetic
LSLQKPRL

SEQ ID NO: 861 - protein, 8 aa, synthetic construct
  REGION 1..8: note = Synthetic
LSLQKPRL

SEQ ID NO: 862 - protein, 8 aa, synthetic construct
  REGION 1..8: note = Synthetic
LSLQKPRL

SEQ ID NO: 863 - protein, 8 aa, synthetic construct
  REGION 1..8: note = Synthetic
LSLQKPRL

SEQ ID NO: 864 - protein, 8 aa, synthetic construct
  REGION 1..8: note = Synthetic
LSLQKPRL

SEQ ID NO: 865 - protein, 8 aa, synthetic construct
  REGION 1..8: note = Synthetic
LSLQKPRL

SEQ ID NO: 866 - protein, 8 aa, synthetic construct
  REGION 1..8: note = Synthetic
STGRNGFK

SEQ ID NO: 867 - protein, 8 aa, synthetic construct
  REGION 1..8: note = Synthetic
LSLQKPRL

SEQ ID NO: 868 - protein, 8 aa, synthetic construct
  REGION 1..8: note = Synthetic
STGRNGFK

SEQ ID NO: 869 - protein, 8 aa, synthetic construct
  REGION 1..8: note = Synthetic
LPAKDDPD

SEQ ID NO: 870 - protein, 8 aa, synthetic construct
  REGION 1..8: note = Synthetic
LSLQKPRL

SEQ ID NO: 871 - protein, 8 aa, synthetic construct
  REGION 1..8: note = Synthetic
RQIRGLEE

SEQ ID NO: 872 - protein, 8 aa, synthetic construct
  REGION 1..8: note = Synthetic
PAKDDPDA

SEQ ID NO: 873 - protein, 8 aa, synthetic construct
  REGION 1..8: note = Synthetic
LPAKDDPD

SEQ ID NO: 874 - protein, 8 aa, synthetic construct
  REGION 1..8: note = Synthetic
TGRNGFKS

SEQ ID NO: 875 - protein, 8 aa, synthetic construct
  REGION 1..8: note = Synthetic
LPAKDDPD

SEQ ID NO: 876 - protein, 8 aa, synthetic construct
  REGION 1..8: note = Synthetic
LSLQKPRL

SEQ ID NO: 877 - protein, 8 aa, synthetic construct
  REGION 1..8: note = Synthetic
LPAKDDPD

SEQ ID NO: 878 - protein, 8 aa, synthetic construct
  REGION 1..8: note = Synthetic
RQIRGLEE

SEQ ID NO: 879 - protein, 8 aa, synthetic construct
  REGION 1..8: note = Synthetic
HRGRTLEI

SEQ ID NO: 880 - protein, 8 aa, synthetic construct
  REGION 1..8: note = Synthetic
PRLLLFSP

SEQ ID NO: 881 - protein, 8 aa, synthetic construct
  REGION 1..8: note = Synthetic
SELQLSVS

SEQ ID NO: 882 - protein, 8 aa, synthetic construct
  REGION 1..8: note = Synthetic
ARLTVAAP

SEQ ID NO: 883 - protein, 8 aa, synthetic construct
  REGION 1..8: note = Synthetic
PRLLLFSP

SEQ ID NO: 884 - protein, 8 aa, synthetic construct
  REGION 1..8: note = Synthetic
AKDDPDAP

SEQ ID NO: 885 - protein, 8 aa, synthetic construct
  REGION 1..8: note = Synthetic
PAKDDPDA

SEQ ID NO: 886 - protein, 8 aa, synthetic construct
  REGION 1..8: note = Synthetic
RLLLFSPS

SEQ ID NO: 887 - protein, 8 aa, synthetic construct
  REGION 1..8: note = Synthetic
DYEYDELP

SEQ ID NO: 888 - protein, 8 aa, synthetic construct
  REGION 1..8: note = Synthetic
PRLLLFSP

SEQ ID NO: 889 - protein, 8 aa, synthetic construct
  REGION 1..8: note = Synthetic
PRLLLFSP

SEQ ID NO: 890 - protein, 8 aa, synthetic construct
  REGION 1..8: note = Synthetic
LTVAAPPS

SEQ ID NO: 891 - protein, 8 aa, synthetic construct
  REGION 1..8: note = Synthetic
DKKREEAP

SEQ ID NO: 892 - protein, 8 aa, synthetic construct
  REGION 1..8: note = Synthetic
KKREEAPS

SEQ ID NO: 893 - protein, 8 aa, synthetic construct
  REGION 1..8: note = Synthetic
LDKKREEA

SEQ ID NO: 894 - protein, 8 aa, synthetic construct
  REGION 1..8: note = Synthetic
LVKSQGVN

SEQ ID NO: 895 - protein, 8 aa, synthetic construct
  REGION 1..8: note = Synthetic
LVKSQGVN

SEQ ID NO: 896 - protein, 8 aa, synthetic construct
  REGION 1..8: note = Synthetic
LVKSQGVN

SEQ ID NO: 897 - protein, 8 aa, synthetic construct
  REGION 1..8: note = Synthetic
LVKSQGVN

SEQ ID NO: 898 - protein, 8 aa, synthetic construct
  REGION 1..8: note = Synthetic
LVKSQGVN

SEQ ID NO: 899 - protein, 8 aa, synthetic construct
  REGION 1..8: note = Synthetic
PLDKKREE

SEQ ID NO: 900 - protein, 8 aa, synthetic construct
  REGION 1..8: note = Synthetic
LVKSQGVN

SEQ ID NO: 901 - protein, 8 aa, synthetic construct
  REGION 1..8: note = Synthetic
LVKSQGVN

SEQ ID NO: 902 - protein, 8 aa, synthetic construct
  REGION 1..8: note = Synthetic
HRPLDKKR

SEQ ID NO: 903 - protein, 8 aa, synthetic construct
  REGION 1..8: note = Synthetic
LVKSQGVN

SEQ ID NO: 904 - protein, 8 aa, synthetic construct
  REGION 1..8: note = Synthetic
SQGVNDNE

SEQ ID NO: 905 - protein, 8 aa, synthetic construct
  REGION 1..8: note = Synthetic
LVKSQGVN

SEQ ID NO: 906 - protein, 8 aa, synthetic construct
  REGION 1..8: note = Synthetic
LVKSQGVN

SEQ ID NO: 907 - protein, 8 aa, synthetic construct
  REGION 1..8: note = Synthetic
KSQGVNDN

SEQ ID NO: 908 - protein, 8 aa, synthetic construct
  REGION 1..8: note = Synthetic
KSQGVNDN

SEQ ID NO: 909 - protein, 8 aa, synthetic construct
  REGION 1..8: note = Synthetic
KSQGVNDN

SEQ ID NO: 910 - protein, 8 aa, synthetic construct
  REGION 1..8: note = Synthetic
LVKSQGVN

SEQ ID NO: 911 - protein, 8 aa, synthetic construct
  REGION 1..8: note = Synthetic
LVKSQGVN

SEQ ID NO: 912 - protein, 8 aa, synthetic construct
  REGION 1..8: note = Synthetic
LVKSQGVN

SEQ ID NO: 913 - protein, 8 aa, synthetic construct
  REGION 1..8: note = Synthetic
KSQGVNDN

SEQ ID NO: 914 - protein, 8 aa, synthetic construct
  REGION 1..8: note = Synthetic
PLDKKREE

SEQ ID NO: 915 - protein, 8 aa, synthetic construct
  REGION 1..8: note = Synthetic
FSARGHRP

SEQ ID NO: 916 - protein, 8 aa, synthetic construct
  REGION 1..8: note = Synthetic
SQGVNDNE

SEQ ID NO: 917 - protein, 8 aa, synthetic construct
  REGION 1..8: note = Synthetic
LVKSQGVN

SEQ ID NO: 918 - protein, 8 aa, synthetic construct
  REGION 1..8: note = Synthetic
LVKSQGVN

SEQ ID NO: 919 - protein, 8 aa, synthetic construct
  REGION 1..8: note = Synthetic
MSMKIRPF

SEQ ID NO: 920 - protein, 8 aa, synthetic construct
  REGION 1..8: note = Synthetic
QGVNDNEE

SEQ ID NO: 921 - protein, 8 aa, synthetic construct
  REGION 1..8: note = Synthetic
LVKSQGVN

SEQ ID NO: 922 - protein, 8 aa, synthetic construct
  REGION 1..8: note = Synthetic
LVKSQGVN

SEQ ID NO: 923 - protein, 8 aa, synthetic construct
  REGION 1..8: note = Synthetic
LVKSQGVN

SEQ ID NO: 924 - protein, 8 aa, synthetic construct
  REGION 1..8: note = Synthetic
NIQRFFGH

SEQ ID NO: 925 - protein, 8 aa, synthetic construct
  REGION 1..8: note = Synthetic
AAEAISDA

SEQ ID NO: 926 - protein, 8 aa, synthetic construct
  REGION 1..8: note = Synthetic
GAEDSLAD

SEQ ID NO: 927 - protein, 8 aa, synthetic construct
  REGION 1..8: note = Synthetic
IQRFFGHG

SEQ ID NO: 928 - protein, 8 aa, synthetic construct
  REGION 1..8: note = Synthetic
GVSSRSFF

SEQ ID NO: 929 - protein, 8 aa, synthetic construct
  REGION 1..8: note = Synthetic
SGKDPNHF

SEQ ID NO: 930 - protein, 8 aa, synthetic construct
  REGION 1..8: note = Synthetic
GVWAAEAI

SEQ ID NO: 931 - protein, 8 aa, synthetic construct
  REGION 1..8: note = Synthetic
ADQAANEW

SEQ ID NO: 932 - protein, 8 aa, synthetic construct
  REGION 1..8: note = Synthetic
GEAFDGAR

SEQ ID NO: 933 - protein, 8 aa, synthetic construct
  REGION 1..8: note = Synthetic
AISDAREN

SEQ ID NO: 934 - protein, 8 aa, synthetic construct
  REGION 1..8: note = Synthetic
VSSRSFFS

SEQ ID NO: 935 - protein, 8 aa, synthetic construct
  REGION 1..8: note = Synthetic
EAFDGARD

SEQ ID NO: 936 - protein, 8 aa, synthetic construct
  REGION 1..8: note = Synthetic
DSLADQAA

SEQ ID NO: 937 - protein, 8 aa, synthetic construct
  REGION 1..8: note = Synthetic
SFFSFLGE

SEQ ID NO: 938 - protein, 8 aa, synthetic construct
  REGION 1..8: note = Synthetic
SLADQAAN

SEQ ID NO: 939 - protein, 8 aa, synthetic construct
  REGION 1..8: note = Synthetic
ENIQRFFG

SEQ ID NO: 940 - protein, 8 aa, synthetic construct
  REGION 1..8: note = Synthetic
NIQRFFGH

SEQ ID NO: 941 - protein, 8 aa, synthetic construct
  REGION 1..8: note = Synthetic
FFGHGAED

SEQ ID NO: 942 - protein, 8 aa, synthetic construct
  REGION 1..8: note = Synthetic
RSGKDPNH

SEQ ID NO: 943 - protein, 8 aa, synthetic construct
  REGION 1..8: note = Synthetic
RFFGHGAE

SEQ ID NO: 944 - protein, 8 aa, synthetic construct
  REGION 1..8: note = Synthetic
EWGRSGKD

SEQ ID NO: 945 - protein, 8 aa, synthetic construct
  REGION 1..8: note = Synthetic
DQAANEWG

SEQ ID NO: 946 - protein, 8 aa, synthetic construct
  REGION 1..8: note = Synthetic
EAISDARE

SEQ ID NO: 947 - protein, 8 aa, synthetic construct
  REGION 1..8: note = Synthetic
RSFFSFLG

SEQ ID NO: 948 - protein, 8 aa, synthetic construct
  REGION 1..8: note = Synthetic
DSLADQAA

SEQ ID NO: 949 - protein, 8 aa, synthetic construct
  REGION 1..8: note = Synthetic
AISDAREN

SEQ ID NO: 950 - protein, 8 aa, synthetic construct
  REGION 1..8: note = Synthetic
EDSLADQA

SEQ ID NO: 951 - protein, 8 aa, synthetic construct
  REGION 1..8: note = Synthetic
AEAISDAR

SEQ ID NO: 952 - protein, 8 aa, synthetic construct
  REGION 1..8: note = Synthetic
FSFLGEAF

SEQ ID NO: 953 - protein, 8 aa, synthetic construct
  REGION 1..8: note = Synthetic
FHARGNYD

SEQ ID NO: 954 - protein, 8 aa, synthetic construct
  REGION 1..8: note = Synthetic
GVSSRSFF

SEQ ID NO: 955 - protein, 8 aa, synthetic construct
  REGION 1..8: note = Synthetic
KRGPGGVW

SEQ ID NO: 956 - protein, 8 aa, synthetic construct
  REGION 1..8: note = Synthetic
FTANDSGP

SEQ ID NO: 957 - protein, 8 aa, synthetic construct
  REGION 1..8: note = Synthetic
ANDSGPRR

SEQ ID NO: 958 - protein, 8 aa, synthetic construct
  REGION 1..8: note = Synthetic
ANDSGPRR

SEQ ID NO: 959 - protein, 8 aa, synthetic construct
  REGION 1..8: note = Synthetic
TANDSGPR

SEQ ID NO: 960 - protein, 8 aa, synthetic construct
  REGION 1..8: note = Synthetic
NDSGPRRY

SEQ ID NO: 961 - protein, 8 aa, synthetic construct
  REGION 1..8: note = Synthetic
AALLSPYS

SEQ ID NO: 962 - protein, 8 aa, synthetic construct
  REGION 1..8: note = Synthetic
YTIAALLS

SEQ ID NO: 963 - protein, 8 aa, synthetic construct
  REGION 1..8: note = Synthetic
RRYTIAAL

SEQ ID NO: 964 - protein, 8 aa, synthetic construct
  REGION 1..8: note = Synthetic
EVVFTAND

SEQ ID NO: 965 - protein, 8 aa, synthetic construct
  REGION 1..8: note = Synthetic
KALGISPF

SEQ ID NO: 966 - protein, 8 aa, synthetic construct
  REGION 1..8: note = Synthetic
PVSAMEPL

SEQ ID NO: 967 - protein, 8 aa, synthetic construct
  REGION 1..8: note = Synthetic
PVSAMEPL

SEQ ID NO: 968 - protein, 8 aa, synthetic construct
  REGION 1..8: note = Synthetic
TSGPNQEQ

SEQ ID NO: 969 - protein, 8 aa, synthetic construct
  REGION 1..8: note = Synthetic
PDLKLVPP

SEQ ID NO: 970 - protein, 8 aa, synthetic construct
  REGION 1..8: note = Synthetic
RQLTSGPN

SEQ ID NO: 971 - protein, 8 aa, synthetic construct
  REGION 1..8: note = Synthetic
PVSAMEPL

SEQ ID NO: 972 - protein, 8 aa, synthetic construct
  REGION 1..8: note = Synthetic
VSAMEPLG

SEQ ID NO: 973 - protein, 8 aa, synthetic construct
  REGION 1..8: note = Synthetic
TSGPNQEQ

SEQ ID NO: 974 - protein, 8 aa, synthetic construct
  REGION 1..8: note = Synthetic
TSGPNQEQ

SEQ ID NO: 975 - protein, 8 aa, synthetic construct
  REGION 1..8: note = Synthetic
AMSRMSLS

SEQ ID NO: 976 - protein, 8 aa, synthetic construct
  REGION 1..8: note = Synthetic
PVSAMEPL

SEQ ID NO: 977 - protein, 8 aa, synthetic construct
  REGION 1..8: note = Synthetic
LLPVLESF

SEQ ID NO: 978 - protein, 8 aa, synthetic construct
  REGION 1..8: note = Synthetic
LPVLESFK

SEQ ID NO: 979 - protein, 8 aa, synthetic construct
  REGION 1..8: note = Synthetic
RVKDLATV

SEQ ID NO: 980 - protein, 8 aa, synthetic construct
  REGION 1..8: note = Synthetic
FWQQDEPP

SEQ ID NO: 981 - protein, 8 aa, synthetic construct
  REGION 1..8: note = Synthetic
PVLESFKV

SEQ ID NO: 982 - protein, 8 aa, synthetic construct
  REGION 1..8: note = Synthetic
ESFKVSFL

SEQ ID NO: 983 - protein, 8 aa, synthetic construct
  REGION 1..8: note = Synthetic
EFWDNLEK

SEQ ID NO: 984 - protein, 8 aa, synthetic construct
  REGION 1..8: note = Synthetic
VSFLSALE

SEQ ID NO: 985 - protein, 8 aa, synthetic construct
  REGION 1..8: note = Synthetic
SFKVSFLS

SEQ ID NO: 986 - protein, 8 aa, synthetic construct
  REGION 1..8: note = Synthetic
FWQQDEPP

SEQ ID NO: 987 - protein, 8 aa, synthetic construct
  REGION 1..8: note = Synthetic
EPLRAELQ

SEQ ID NO: 988 - protein, 8 aa, synthetic construct
  REGION 1..8: note = Synthetic
EPLRAELQ

SEQ ID NO: 989 - protein, 8 aa, synthetic construct
  REGION 1..8: note = Synthetic
FWQQDEPP

SEQ ID NO: 990 - protein, 8 aa, synthetic construct
  REGION 1..8: note = Synthetic
LLSALVET

SEQ ID NO: 991 - protein, 8 aa, synthetic construct
  REGION 1..8: note = Synthetic
ITLLSALV

SEQ ID NO: 992 - protein, 8 aa, synthetic construct
  REGION 1..8: note = Synthetic
LSALVETR

SEQ ID NO: 993 - protein, 8 aa, synthetic construct
  REGION 1..8: note = Synthetic
ALVETRTI

SEQ ID NO: 994 - protein, 8 aa, synthetic construct
  REGION 1..8: note = Synthetic
VPTDTQNI

SEQ ID NO: 995 - protein, 8 aa, synthetic construct
  REGION 1..8: note = Synthetic
TLLSALVE

SEQ ID NO: 996 - protein, 8 aa, synthetic construct
  REGION 1..8: note = Synthetic
LCHPNSPL

SEQ ID NO: 997 - protein, 8 aa, synthetic construct
  REGION 1..8: note = Synthetic
PFLMIIVP

SEQ ID NO: 998 - protein, 8 aa, synthetic construct
  REGION 1..8: note = Synthetic
AVLCHPNS

SEQ ID NO: 999 - protein, 8 aa, synthetic construct
  REGION 1..8: note = Synthetic
GSWQRSLQ

SEQ ID NO: 1000 - protein, 8 aa, synthetic construct
  REGION 1..8: note = Synthetic
GSWQRSLQ

SEQ ID NO: 1001 - protein, 8 aa, synthetic construct
  REGION 1..8: note = Synthetic
WQRSLQDT

SEQ ID NO: 1002 - protein, 8 aa, synthetic construct
  REGION 1..8: note = Synthetic
SWQRSLQD

SEQ ID NO: 1003 - protein, 8 aa, synthetic construct
  REGION 1..8: note = Synthetic
EDKRHSQG

SEQ ID NO: 1004 - protein, 8 aa, synthetic construct
  REGION 1..8: note = Synthetic
WQRSLQDT

SEQ ID NO: 1005 - protein, 8 aa, synthetic construct
  REGION 1..8: note = Synthetic
EDKRHSQG

SEQ ID NO: 1006 - protein, 8 aa, synthetic construct
  REGION 1..8: note = Synthetic
QRSLQDTE

SEQ ID NO: 1007 - protein, 8 aa, synthetic construct
  REGION 1..8: note = Synthetic
SWQRSLQD

SEQ ID NO: 1008 - protein, 8 aa, synthetic construct
  REGION 1..8: note = Synthetic
RGRRDFPE

SEQ ID NO: 1009 - protein, 8 aa, synthetic construct
  REGION 1..8: note = Synthetic
IAKRHDEF

SEQ ID NO: 1010 - protein, 8 aa, synthetic construct
  REGION 1..8: note = Synthetic
LTSGSVFP

SEQ ID NO: 1011 - protein, 8 aa, synthetic construct
  REGION 1..8: note = Synthetic
LTSGSVFP

SEQ ID NO: 1012 - protein, 8 aa, synthetic construct
  REGION 1..8: note = Synthetic
LTSGSVFP

SEQ ID NO: 1013 - protein, 8 aa, synthetic construct
  REGION 1..8: note = Synthetic
LTSGSVFP

SEQ ID NO: 1014 - protein, 8 aa, synthetic construct
  REGION 1..8: note = Synthetic
LTSGSVFP

SEQ ID NO: 1015 - protein, 8 aa, synthetic construct
  REGION 1..8: note = Synthetic
LTSGSVFP

SEQ ID NO: 1016 - protein, 8 aa, synthetic construct
  REGION 1..8: note = Synthetic
SVFPQQTG

SEQ ID NO: 1017 - protein, 8 aa, synthetic construct
  REGION 1..8: note = Synthetic
TSGSVFPQ

SEQ ID NO: 1018 - protein, 8 aa, synthetic construct
  REGION 1..8: note = Synthetic
SVFPQQTG

SEQ ID NO: 1019 - protein, 8 aa, synthetic construct
  REGION 1..8: note = Synthetic
LTSGSVFP

SEQ ID NO: 1020 - protein, 8 aa, synthetic construct
  REGION 1..8: note = Synthetic
LTSGSVFP

SEQ ID NO: 1021 - protein, 8 aa, synthetic construct
  REGION 1..8: note = Synthetic
LTSGSVFP

SEQ ID NO: 1022 - protein, 8 aa, synthetic construct
  REGION 1..8: note = Synthetic
NIQRLTGR

SEQ ID NO: 1023 - protein, 8 aa, synthetic construct
  REGION 1..8: note = Synthetic
IQRLTGRG

SEQ ID NO: 1024 - protein, 8 aa, synthetic construct
  REGION 1..8: note = Synthetic
RSGRDPNH

SEQ ID NO: 1025 - protein, 8 aa, synthetic construct
  REGION 1..8: note = Synthetic
QRLTGRGA

SEQ ID NO: 1026 - protein, 8 aa, synthetic construct
  REGION 1..8: note = Synthetic
IQRLTGRG

SEQ ID NO: 1027 - protein, 8 aa, synthetic construct
  REGION 1..8: note = Synthetic
NIQRLTGR

SEQ ID NO: 1028 - protein, 8 aa, synthetic construct
  REGION 1..8: note = Synthetic
GAEDSLAD

SEQ ID NO: 1029 - protein, 8 aa, synthetic construct
  REGION 1..8: note = Synthetic
RLTGRGAE

SEQ ID NO: 1030 - protein, 8 aa, synthetic construct
  REGION 1..8: note = Synthetic
TGRGAEDS

SEQ ID NO: 1031 - protein, 8 aa, synthetic construct
  REGION 1..8: note = Synthetic
AAKRGPGG

SEQ ID NO: 1032 - protein, 8 aa, synthetic construct
  REGION 1..8: note = Synthetic
GAWAAEVI

SEQ ID NO: 1033 - protein, 8 aa, synthetic construct
  REGION 1..8: note = Synthetic
DSLADQAA

SEQ ID NO: 1034 - protein, 8 aa, synthetic construct
  REGION 1..8: note = Synthetic
AWAAEVIS

SEQ ID NO: 1035 - protein, 5 aa, synthetic construct
  REGION 1..5: note = Synthetic
MSDKP

SEQ ID NO: 1036 - protein, 5 aa, synthetic construct
  REGION 1..5: note = Synthetic
MSDKP

SEQ ID NO: 1037 - protein, 8 aa, synthetic construct
  REGION 1..8: note = Synthetic
KTETQEKN

SEQ ID NO: 1038 - protein, 5 aa, synthetic construct
  REGION 1..5: note = Synthetic
MSDKP

SEQ ID NO: 1039 - protein, 5 aa, synthetic construct
  REGION 1..5: note = Synthetic
MSDKP

SEQ ID NO: 1040 - protein, 8 aa, synthetic construct
  REGION 1..8: note = Synthetic
KKTETQEK

SEQ ID NO: 1041 - protein, 8 aa, synthetic construct
  REGION 1..8: note = Synthetic
ETQEKNPL

SEQ ID NO: 1042 - protein, 8 aa, synthetic construct
  REGION 1..8: note = Synthetic
KLKKTETQ

SEQ ID NO: 1043 - protein, 8 aa, synthetic construct
  REGION 1..8: note = Synthetic
TETQEKNP

SEQ ID NO: 1044 - protein, 8 aa, synthetic construct
  REGION 1..8: note = Synthetic
TQEKNPLP

SEQ ID NO: 1045 - protein, 8 aa, synthetic construct
  REGION 1..8: note = Synthetic
PVQRILGG

SEQ ID NO: 1046 - protein, 8 aa, synthetic construct
  REGION 1..8: note = Synthetic
PVQRILGG

SEQ ID NO: 1047 - protein, 8 aa, synthetic construct
  REGION 1..8: note = Synthetic
GVYVKVTS

SEQ ID NO: 1048 - protein, 8 aa, synthetic construct
  REGION 1..8: note = Synthetic
PVQRILGG

SEQ ID NO: 1049 - protein, 8 aa, synthetic construct
  REGION 1..8: note = Synthetic
PVQRILGG

SEQ ID NO: 1050 - protein, 8 aa, synthetic construct
  REGION 1..8: note = Synthetic
SALGAVIA

SEQ ID NO: 1051 - protein, 8 aa, synthetic construct
  REGION 1..8: note = Synthetic
MSALGAVI

SEQ ID NO: 1052 - protein, 8 aa, synthetic construct
  REGION 1..8: note = Synthetic
HCLLVTLA

SEQ ID NO: 1053 - protein, 8 aa, synthetic construct
  REGION 1..8: note = Synthetic
LLVTLAAH

SEQ ID NO: 1054 - protein, 5 aa, synthetic construct
  REGION 1..5: note = Synthetic
MVLSP

SEQ ID NO: 1055 - protein, 5 aa, synthetic construct
  REGION 1..5: note = Synthetic
MVLSP

SEQ ID NO: 1056 - protein, 8 aa, synthetic construct
  REGION 1..8: note = Synthetic
ASLDKFLA

SEQ ID NO: 1057 - protein, 8 aa, synthetic construct
  REGION 1..8: note = Synthetic
LVTLAAHL

SEQ ID NO: 1058 - protein, 5 aa, synthetic construct
  REGION 1..5: note = Synthetic
MVLSP

SEQ ID NO: 1059 - protein, 5 aa, synthetic construct
  REGION 1..5: note = Synthetic
MVLSP

SEQ ID NO: 1060 - protein, 8 aa, synthetic construct
  REGION 1..8: note = Synthetic
QKVRYEGS

SEQ ID NO: 1061 - protein, 5 aa, synthetic construct
  REGION 1..5: note = Synthetic
MGEDA

SEQ ID NO: 1062 - protein, 8 aa, synthetic construct
  REGION 1..8: note = Synthetic
EGSYALTS

SEQ ID NO: 1063 - protein, 5 aa, synthetic construct
  REGION 1..5: note = Synthetic
MGEDA

SEQ ID NO: 1064 - protein, 5 aa, synthetic construct
  REGION 1..5: note = Synthetic
MGEDA

SEQ ID NO: 1065 - protein, 8 aa, synthetic construct
  REGION 1..8: note = Synthetic
RYEGSYAL

SEQ ID NO: 1066 - protein, 8 aa, synthetic construct
  REGION 1..8: note = Synthetic
PPLGAPGL

SEQ ID NO: 1067 - protein, 8 aa, synthetic construct
  REGION 1..8: note = Synthetic
RKTRTVVQ

SEQ ID NO: 1068 - protein, 8 aa, synthetic construct
  REGION 1..8: note = Synthetic
PPLGAPGL

SEQ ID NO: 1069 - protein, 8 aa, synthetic construct
  REGION 1..8: note = Synthetic
HVLLAAPP

SEQ ID NO: 1070 - protein, 8 aa, synthetic construct
  REGION 1..8: note = Synthetic
PPLGAPGL

SEQ ID NO: 1071 - protein, 8 aa, synthetic construct
  REGION 1..8: note = Synthetic
VLLAAPPG

SEQ ID NO: 1072 - protein, 8 aa, synthetic construct
  REGION 1..8: note = Synthetic
PPLGAPGL

SEQ ID NO: 1073 - protein, 8 aa, synthetic construct
  REGION 1..8: note = Synthetic
HVLLAAPP

SEQ ID NO: 1074 - protein, 8 aa, synthetic construct
  REGION 1..8: note = Synthetic
QQKKHSGF

SEQ ID NO: 1075 - protein, 8 aa, synthetic construct
  REGION 1..8: note = Synthetic
QQKKHSGF

SEQ ID NO: 1076 - protein, 8 aa, synthetic construct
  REGION 1..8: note = Synthetic
LQVRGYPE

SEQ ID NO: 1077 - protein, 8 aa, synthetic construct
  REGION 1..8: note = Synthetic
QQKKHSGF

SEQ ID NO: 1078 - protein, 8 aa, synthetic construct
  REGION 1..8: note = Synthetic
AEKRLEGQ

SEQ ID NO: 1079 - protein, 8 aa, synthetic construct
  REGION 1..8: note = Synthetic
AEKRLEGQ

SEQ ID NO: 1080 - protein, 8 aa, synthetic construct
  REGION 1..8: note = Synthetic
LPSRSSKI

SEQ ID NO: 1081 - protein, 8 aa, synthetic construct
  REGION 1..8: note = Synthetic
LPSRSSKI

SEQ ID NO: 1082 - protein, 8 aa, synthetic construct
  REGION 1..8: note = Synthetic
SSKITHRI

SEQ ID NO: 1083 - protein, 8 aa, synthetic construct
  REGION 1..8: note = Synthetic
SRSSKITH

SEQ ID NO: 1084 - protein, 8 aa, synthetic construct
  REGION 1..8: note = Synthetic
LALGSPMY

SEQ ID NO: 1085 - protein, 8 aa, synthetic construct
  REGION 1..8: note = Synthetic
KITHRIHW

SEQ ID NO: 1086 - protein, 8 aa, synthetic construct
  REGION 1..8: note = Synthetic
SKITHRIH

SEQ ID NO: 1087 - protein, 8 aa, synthetic construct
  REGION 1..8: note = Synthetic
THRIHWES

SEQ ID NO: 1088 - protein, 8 aa, synthetic construct
  REGION 1..8: note = Synthetic
ITHRIHWE

SEQ ID NO: 1089 - protein, 8 aa, synthetic construct
  REGION 1..8: note = Synthetic
FWGRTSAG

SEQ ID NO: 1090 - protein, 8 aa, synthetic construct
  REGION 1..8: note = Synthetic
TSAGTRQP

SEQ ID NO: 1091 - protein, 8 aa, synthetic construct
  REGION 1..8: note = Synthetic
LTSDLQAQ

SEQ ID NO: 1092 - protein, 8 aa, synthetic construct
  REGION 1..8: note = Synthetic
FELLFWGR

SEQ ID NO: 1093 - protein, 8 aa, synthetic construct
  REGION 1..8: note = Synthetic
TSAGTRQP

SEQ ID NO: 1094 - protein, 8 aa, synthetic construct
  REGION 1..8: note = Synthetic
FWGRTSAG

SEQ ID NO: 1095 - protein, 8 aa, synthetic construct
  REGION 1..8: note = Synthetic
FELLFWGR

SEQ ID NO: 1096 - protein, 8 aa, synthetic construct
  REGION 1..8: note = Synthetic
QGHNSVFL

SEQ ID NO: 1097 - protein, 8 aa, synthetic construct
  REGION 1..8: note = Synthetic
QGHNSVFL

SEQ ID NO: 1098 - protein, 8 aa, synthetic construct
  REGION 1..8: note = Synthetic
QGHNSVFL

SEQ ID NO: 1099 - protein, 8 aa, synthetic construct
  REGION 1..8: note = Synthetic
RWKNFPSP

SEQ ID NO: 1100 - protein, 8 aa, synthetic construct
  REGION 1..8: note = Synthetic
QGHNSVFL

SEQ ID NO: 1101 - protein, 8 aa, synthetic construct
  REGION 1..8: note = Synthetic
DKVWVYPP

SEQ ID NO: 1102 - protein, 8 aa, synthetic construct
  REGION 1..8: note = Synthetic
QTQFHVQP

SEQ ID NO: 1103 - protein, 8 aa, synthetic construct
  REGION 1..8: note = Synthetic
QPVSLANT

SEQ ID NO: 1104 - protein, 8 aa, synthetic construct
  REGION 1..8: note = Synthetic
QTQFHVQP

SEQ ID NO: 1105 - protein, 5 aa, synthetic construct
  REGION 1..5: note = Synthetic
MAAPR

SEQ ID NO: 1106 - protein, 8 aa, synthetic construct
  REGION 1..8: note = Synthetic
QTQFHVQP

SEQ ID NO: 1107 - protein, 8 aa, synthetic construct
  REGION 1..8: note = Synthetic
PKPKVNPF

SEQ ID NO: 1108 - protein, 8 aa, synthetic construct
  REGION 1..8: note = Synthetic
SARASEAE

SEQ ID NO: 1109 - protein, 8 aa, synthetic construct
  REGION 1..8: note = Synthetic
SARASEAE

SEQ ID NO: 1110 - protein, 8 aa, synthetic construct
  REGION 1..8: note = Synthetic
FSEFWDLD

SEQ ID NO: 1111 - protein, 8 aa, synthetic construct
  REGION 1..8: note = Synthetic
SARASEAE

SEQ ID NO: 1112 - protein, 8 aa, synthetic construct
  REGION 1..8: note = Synthetic
WDLDPEVR

SEQ ID NO: 1113 - protein, 8 aa, synthetic construct
  REGION 1..8: note = Synthetic
KRFPVGPP

SEQ ID NO: 1114 - protein, 8 aa, synthetic construct
  REGION 1..8: note = Synthetic
VSKRFPVG

SEQ ID NO: 1115 - protein, 8 aa, synthetic construct
  REGION 1..8: note = Synthetic
KRFPVGPP

SEQ ID NO: 1116 - protein, 8 aa, synthetic construct
  REGION 1..8: note = Synthetic
KRVPGQGS

SEQ ID NO: 1117 - protein, 8 aa, synthetic construct
  REGION 1..8: note = Synthetic
QVKRVPGQ

SEQ ID NO: 1118 - protein, 8 aa, synthetic construct
  REGION 1..8: note = Synthetic
PKTPGRAG

SEQ ID NO: 1119 - protein, 8 aa, synthetic construct
  REGION 1..8: note = Synthetic
ERKLKHMQ

SEQ ID NO: 1120 - protein, 8 aa, synthetic construct
  REGION 1..8: note = Synthetic
QQLNKPEV

SEQ ID NO: 1121 - protein, 8 aa, synthetic construct
  REGION 1..8: note = Synthetic
EPTESTQQ

SEQ ID NO: 1122 - protein, 8 aa, synthetic construct
  REGION 1..8: note = Synthetic
TESTQQLN

SEQ ID NO: 1123 - protein, 8 aa, synthetic construct
  REGION 1..8: note = Synthetic
HAFGQTDM

SEQ ID NO: 1124 - protein, 8 aa, synthetic construct
  REGION 1..8: note = Synthetic
HAFGQTDM

SEQ ID NO: 1125 - protein, 8 aa, synthetic construct
  REGION 1..8: note = Synthetic
HAFGQTDM

SEQ ID NO: 1126 - protein, 8 aa, synthetic construct
  REGION 1..8: note = Synthetic
VFRRDAHK

SEQ ID NO: 1127 - protein, 8 aa, synthetic construct
  REGION 1..8: note = Synthetic
VFRRDAHK

SEQ ID NO: 1128 - protein, 8 aa, synthetic construct
  REGION 1..8: note = Synthetic
VFRRDAHK

SEQ ID NO: 1129 - protein, 8 aa, synthetic construct
  REGION 1..8: note = Synthetic
GLQMGTNR

SEQ ID NO: 1130 - protein, 8 aa, synthetic construct
  REGION 1..8: note = Synthetic
IGLQMGTN

SEQ ID NO: 1131 - protein, 8 aa, synthetic construct
  REGION 1..8: note = Synthetic
QAGMTGYG

SEQ ID NO: 1132 - protein, 8 aa, synthetic construct
  REGION 1..8: note = Synthetic
YGKRHKED

SEQ ID NO: 1133 - protein, 8 aa, synthetic construct
  REGION 1..8: note = Synthetic
QGAPLEPV

SEQ ID NO: 1134 - protein, 8 aa, synthetic construct
  REGION 1..8: note = Synthetic
PLLGAQGA

SEQ ID NO: 1135 - protein, 8 aa, synthetic construct
  REGION 1..8: note = Synthetic
QGAPLEPV

SEQ ID NO: 1136 - protein, 8 aa, synthetic construct
  REGION 1..8: note = Synthetic
AAPPGRPE

SEQ ID NO: 1137 - protein, 8 aa, synthetic construct
  REGION 1..8: note = Synthetic
AAPPGRPE

SEQ ID NO: 1138 - protein, 8 aa, synthetic construct
  REGION 1..8: note = Synthetic
GLGAAPPG

SEQ ID NO: 1139 - protein, 8 aa, synthetic construct
  REGION 1..8: note = Synthetic
RKKNAPPE

SEQ ID NO: 1140 - protein, 8 aa, synthetic construct
  REGION 1..8: note = Synthetic
KRKKNAPP

SEQ ID NO: 1141 - protein, 8 aa, synthetic construct
  REGION 1..8: note = Synthetic
GLGAAPPG

SEQ ID NO: 1142 - protein, 8 aa, synthetic construct
  REGION 1..8: note = Synthetic
EEEAAEAL

SEQ ID NO: 1143 - protein, 8 aa, synthetic construct
  REGION 1..8: note = Synthetic
KRKKNAPP

SEQ ID NO: 1144 - protein, 8 aa, synthetic construct
  REGION 1..8: note = Synthetic
LLHCHVTD

SEQ ID NO: 1145 - protein, 8 aa, synthetic construct
  REGION 1..8: note = Synthetic
PAWAKEKH

SEQ ID NO: 1146 - protein, 8 aa, synthetic construct
  REGION 1..8: note = Synthetic
PFTASPAS

SEQ ID NO: 1147 - protein, 8 aa, synthetic construct
  REGION 1..8: note = Synthetic
LVLQEILE

SEQ ID NO: 1148 - protein, 8 aa, synthetic construct
  REGION 1..8: note = Synthetic
TNQYNNPA

SEQ ID NO: 1149 - protein, 8 aa, synthetic construct
  REGION 1..8: note = Synthetic
FPLATYAP

SEQ ID NO: 1150 - protein, 8 aa, synthetic construct
  REGION 1..8: note = Synthetic
FPLATYAP

SEQ ID NO: 1151 - protein, 8 aa, synthetic construct
  REGION 1..8: note = Synthetic
PVISAEKA

SEQ ID NO: 1152 - protein, 5 aa, synthetic construct
  REGION 1..5: note = Synthetic
MVHLT

SEQ ID NO: 1153 - protein, 5 aa, synthetic construct
  REGION 1..5: note = Synthetic
MVHLT

SEQ ID NO: 1154 - protein, 8 aa, synthetic construct
  REGION 1..8: note = Synthetic
LGRLLVVY

SEQ ID NO: 1155 - protein, 8 aa, synthetic construct
  REGION 1..8: note = Synthetic
SLNTVGGT

SEQ ID NO: 1156 - protein, 8 aa, synthetic construct
  REGION 1..8: note = Synthetic
LNTVGGTG

SEQ ID NO: 1157 - protein, 8 aa, synthetic construct
  REGION 1..8: note = Synthetic
SLNTVGGT

SEQ ID NO: 1158 - protein, 8 aa, synthetic construct
  REGION 1..8: note = Synthetic
TSLNTVGG

SEQ ID NO: 1159 - protein, 8 aa, synthetic construct
  REGION 1..8: note = Synthetic
EVSGFEIP

SEQ ID NO: 1160 - protein, 8 aa, synthetic construct
  REGION 1..8: note = Synthetic
RITRSILQ

SEQ ID NO: 1161 - protein, 8 aa, synthetic construct
  REGION 1..8: note = Synthetic
VTTVASHT

SEQ ID NO: 1162 - protein, 8 aa, synthetic construct
  REGION 1..8: note = Synthetic
KNPKFMET

SEQ ID NO: 1163 - protein, 8 aa, synthetic construct
  REGION 1..8: note = Synthetic
PAQGTPDV

SEQ ID NO: 1164 - protein, 8 aa, synthetic construct
  REGION 1..8: note = Synthetic
QGTPDVSS

SEQ ID NO: 1165 - protein, 8 aa, synthetic construct
  REGION 1..8: note = Synthetic
QLIKAIQL

SEQ ID NO: 1166 - protein, 8 aa, synthetic construct
  REGION 1..8: note = Synthetic
EGFGHLSP

SEQ ID NO: 1167 - protein, 8 aa, synthetic construct
  REGION 1..8: note = Synthetic
NRLTIGEG

SEQ ID NO: 1168 - protein, 8 aa, synthetic construct
  REGION 1..8: note = Synthetic
RSRREPPP

SEQ ID NO: 1169 - protein, 8 aa, synthetic construct
  REGION 1..8: note = Synthetic
SRREPPPR

SEQ ID NO: 1170 - protein, 8 aa, synthetic construct
  REGION 1..8: note = Synthetic
GSVTSYVL

SEQ ID NO: 1171 - protein, 8 aa, synthetic construct
  REGION 1..8: note = Synthetic
SVTSYVLT

SEQ ID NO: 1172 - protein, 5 aa, synthetic construct
  REGION 1..5: note = Synthetic
MSETA

SEQ ID NO: 1173 - protein, 5 aa, synthetic construct
  REGION 1..5: note = Synthetic
MSETA

SEQ ID NO: 1174 - protein, 5 aa, synthetic construct
  REGION 1..5: note = Synthetic
MSETA

SEQ ID NO: 1175 - protein, 8 aa, synthetic construct
  REGION 1..8: note = Synthetic
CNHFTHFG

SEQ ID NO: 1176 - protein, 8 aa, synthetic construct
  REGION 1..8: note = Synthetic
CNHFTHFG

SEQ ID NO: 1177 - protein, 8 aa, synthetic construct
  REGION 1..8: note = Synthetic
SEASYELT

SEQ ID NO: 1178 - protein, 8 aa, synthetic construct
  REGION 1..8: note = Synthetic
GSVASYEL

SEQ ID NO: 1179 - protein, 8 aa, synthetic construct
  REGION 1..8: note = Synthetic
SWAQSVLT

SEQ ID NO: 1180 - protein, 8 aa, synthetic construct
  REGION 1..8: note = Synthetic
QSVLTQPP

SEQ ID NO: 1181 - protein, 8 aa, synthetic construct
  REGION 1..8: note = Synthetic
GSWAQSVL

SEQ ID NO: 1182 - protein, 8 aa, synthetic construct
  REGION 1..8: note = Synthetic
SWAQSVLT

SEQ ID NO: 1183 - protein, 8 aa, synthetic construct
  REGION 1..8: note = Synthetic
SYELTQPP

SEQ ID NO: 1184 - protein, 8 aa, synthetic construct
  REGION 1..8: note = Synthetic
GSVATPLG

SEQ ID NO: 1185 - protein, 8 aa, synthetic construct
  REGION 1..8: note = Synthetic
DTTGEIVL

SEQ ID NO: 1186 - protein, 8 aa, synthetic construct
  REGION 1..8: note = Synthetic
TTGEIVLT

SEQ ID NO: 1187 - protein, 8 aa, synthetic construct
  REGION 1..8: note = Synthetic
GSSGDVVM

SEQ ID NO: 1188 - protein, 8 aa, synthetic construct
  REGION 1..8: note = Synthetic
GSSGDVVM

SEQ ID NO: 1189 - protein, 8 aa, synthetic construct
  REGION 1..8: note = Synthetic
PVGKFFQY

SEQ ID NO: 1190 - protein, 8 aa, synthetic construct
  REGION 1..8: note = Synthetic
PVGKFFQY

SEQ ID NO: 1191 - protein, 8 aa, synthetic construct
  REGION 1..8: note = Synthetic
VNFLSYFV

SEQ ID NO: 1192 - protein, 8 aa, synthetic construct
  REGION 1..8: note = Synthetic
IKKAGTEL

SEQ ID NO: 1193 - protein, 8 aa, synthetic construct
  REGION 1..8: note = Synthetic
FQTVTDYG

SEQ ID NO: 1194 - protein, 8 aa, synthetic construct
  REGION 1..8: note = Synthetic
GSSGDIVM

SEQ ID NO: 1195 - protein, 8 aa, synthetic construct
  REGION 1..8: note = Synthetic
GSSGDIVM

SEQ ID NO: 1196 - protein, 8 aa, synthetic construct
  REGION 1..8: note = Synthetic
RTATSEYQ

SEQ ID NO: 1197 - protein, 8 aa, synthetic construct
  REGION 1..8: note = Synthetic
TATSEYQT

SEQ ID NO: 1198 - protein, 8 aa, synthetic construct
  REGION 1..8: note = Synthetic
LVHSQHVF

SEQ ID NO: 1199 - protein, 8 aa, synthetic construct
  REGION 1..8: note = Synthetic
SAECTVFL

SEQ ID NO: 1200 - protein, 8 aa, synthetic construct
  REGION 1..8: note = Synthetic
ECTVFLDH

SEQ ID NO: 1201 - protein, 8 aa, synthetic construct
  REGION 1..8: note = Synthetic
GVRAEEAG

SEQ ID NO: 1202 - protein, 8 aa, synthetic construct
  REGION 1..8: note = Synthetic
GVRAEEAG

SEQ ID NO: 1203 - protein, 8 aa, synthetic construct
  REGION 1..8: note = Synthetic
RSKRDVGS

SEQ ID NO: 1204 - protein, 8 aa, synthetic construct
  REGION 1..8: note = Synthetic
GELRIETK

SEQ ID NO: 1205 - protein, 8 aa, synthetic construct
  REGION 1..8: note = Synthetic
LVHGELRI

SEQ ID NO: 1206 - protein, 8 aa, synthetic construct
  REGION 1..8: note = Synthetic
NHMAAQPQ

SEQ ID NO: 1207 - protein, 8 aa, synthetic construct
  REGION 1..8: note = Synthetic
HANHMAAQ

SEQ ID NO: 1208 - protein, 8 aa, synthetic construct
  REGION 1..8: note = Synthetic
GAVTVAWK

SEQ ID NO: 1209 - protein, 8 aa, synthetic construct
  REGION 1..8: note = Synthetic
GAVTVAWK

SEQ ID NO: 1210 - protein, 8 aa, synthetic construct
  REGION 1..8: note = Synthetic
SPVKAGVE

SEQ ID NO: 1211 - protein, 8 aa, synthetic construct
  REGION 1..8: note = Synthetic
KTWGQEQT

SEQ ID NO: 1212 - protein, 8 aa, synthetic construct
  REGION 1..8: note = Synthetic
NKVDLSFS

SEQ ID NO: 1213 - protein, 8 aa, synthetic construct
  REGION 1..8: note = Synthetic
PTDASVSG

SEQ ID NO: 1214 - protein, 5 aa, synthetic construct
  REGION 1..5: note = Synthetic
MAQQA

SEQ ID NO: 1215 - protein, 5 aa, synthetic construct
  REGION 1..5: note = Synthetic
MTGLS

SEQ ID NO: 1216 - protein, 5 aa, synthetic construct
  REGION 1..5: note = Synthetic
MTGLS

SEQ ID NO: 1217 - protein, 8 aa, synthetic construct
  REGION 1..8: note = Synthetic
GSSGDIVM

SEQ ID NO: 1218 - protein, 8 aa, synthetic construct
  REGION 1..8: note = Synthetic
GSSGDIVM

SEQ ID NO: 1219 - protein, 8 aa, synthetic construct
  REGION 1..8: note = Synthetic
RMRRGAGG

SEQ ID NO: 1220 - protein, 8 aa, synthetic construct
  REGION 1..8: note = Synthetic
SDAFHDNL

SEQ ID NO: 1221 - protein, 8 aa, synthetic construct
  REGION 1..8: note = Synthetic
GDRNKPGV

SEQ ID NO: 1222 - protein, 5 aa, synthetic construct
  REGION 1..5: note = Synthetic
MSETS

SEQ ID NO: 1223 - protein, 8 aa, synthetic construct
  REGION 1..8: note = Synthetic
KTRREAED

SEQ ID NO: 1224 - protein, 8 aa, synthetic construct
  REGION 1..8: note = Synthetic
GKFKSGFP

SEQ ID NO: 1225 - protein, 8 aa, synthetic construct
  REGION 1..8: note = Synthetic
DTTGEIVL

SEQ ID NO: 1226 - protein, 8 aa, synthetic construct
  REGION 1..8: note = Synthetic
GARCDIQM

SEQ ID NO: 1227 - protein, 8 aa, synthetic construct
  REGION 1..8: note = Synthetic
AGFDFSFL

SEQ ID NO: 1228 - protein, 8 aa, synthetic construct
  REGION 1..8: note = Synthetic
CVGSQEEA

SEQ ID NO: 1229 - protein, 8 aa, synthetic construct
  REGION 1..8: note = Synthetic
AGHAQRDP

SEQ ID NO: 1230 - protein, 8 aa, synthetic construct
  REGION 1..8: note = Synthetic
AGHAQRDP

SEQ ID NO: 1231 - protein, 8 aa, synthetic construct
  REGION 1..8: note = Synthetic
RDRRQIFL

SEQ ID NO: 1232 - protein, 8 aa, synthetic construct
  REGION 1..8: note = Synthetic
LLYKIVRG

SEQ ID NO: 1233 - protein, 8 aa, synthetic construct
  REGION 1..8: note = Synthetic
GSWANFML

SEQ ID NO: 1234 - protein, 8 aa, synthetic construct
  REGION 1..8: note = Synthetic
SWANFMLT

SEQ ID NO: 1235 - protein, 8 aa, synthetic construct
  REGION 1..8: note = Synthetic
DTTGEIVM

SEQ ID NO: 1236 - protein, 8 aa, synthetic construct
  REGION 1..8: note = Synthetic
PTRGSVLL

SEQ ID NO: 1237 - protein, 5 aa, synthetic construct
  REGION 1..5: note = Synthetic
MSETA

SEQ ID NO: 1238 - protein, 5 aa, synthetic construct
  REGION 1..5: note = Synthetic
MTEKA

SEQ ID NO: 1239 - protein, 8 aa, synthetic construct
  REGION 1..8: note = Synthetic
FARREAPY

SEQ ID NO: 1240 - protein, 8 aa, synthetic construct
  REGION 1..8: note = Synthetic
PWRADDIL

SEQ ID NO: 1241 - protein, 8 aa, synthetic construct
  REGION 1..8: note = Synthetic
GSWAQSAL

SEQ ID NO: 1242 - protein, 8 aa, synthetic construct
  REGION 1..8: note = Synthetic
QSALTQPP

SEQ ID NO: 1243 - protein, 8 aa, synthetic construct
  REGION 1..8: note = Synthetic
SSLAQPLV

SEQ ID NO: 1244 - protein, 8 aa, synthetic construct
  REGION 1..8: note = Synthetic
TVLQQQYN

SEQ ID NO: 1245 - protein, 8 aa, synthetic construct
  REGION 1..8: note = Synthetic
LRDPADAS

SEQ ID NO: 1246 - protein, 8 aa, synthetic construct
  REGION 1..8: note = Synthetic
QAQAEPLQ

SEQ ID NO: 1247 - protein, 8 aa, synthetic construct
  REGION 1..8: note = Synthetic
LYDNQEFP

SEQ ID NO: 1248 - protein, 8 aa, synthetic construct
  REGION 1..8: note = Synthetic
VGLGEKKE

SEQ ID NO: 1249 - protein, 8 aa, synthetic construct
  REGION 1..8: note = Synthetic
GVQCEVQL

SEQ ID NO: 1250 - protein, 8 aa, synthetic construct
  REGION 1..8: note = Synthetic
SWAQSALT

SEQ ID NO: 1251 - protein, 8 aa, synthetic construct
  REGION 1..8: note = Synthetic
DIDCKLMP

SEQ ID NO: 1252 - protein, 8 aa, synthetic construct
  REGION 1..8: note = Synthetic
EQGRDGPP

SEQ ID NO: 1253 - protein, 8 aa, synthetic construct
  REGION 1..8: note = Synthetic
SLMKRPPG

SEQ ID NO: 1254 - protein, 8 aa, synthetic construct
  REGION 1..8: note = Synthetic
AIRHFENK

SEQ ID NO: 1255 - protein, 8 aa, synthetic construct
  REGION 1..8: note = Synthetic
QPAHLTFP

SEQ ID NO: 1256 - protein, 8 aa, synthetic construct
  REGION 1..8: note = Synthetic
RHRARHKA

SEQ ID NO: 1257 - protein, 8 aa, synthetic construct
  REGION 1..8: note = Synthetic
SVASYELT

SEQ ID NO: 1258 - protein, 8 aa, synthetic construct
  REGION 1..8: note = Synthetic
PGGLQPLS

SEQ ID NO: 1259 - protein, 8 aa, synthetic construct
  REGION 1..8: note = Synthetic
RQVRTIVE

SEQ ID NO: 1260 - protein, 8 aa, synthetic construct
  REGION 1..8: note = Synthetic
MNTFSVVP

SEQ ID NO: 1261 - protein, 8 aa, synthetic construct
  REGION 1..8: note = Synthetic
PGLRAAPG

SEQ ID NO: 1262 - protein, 8 aa, synthetic construct
  REGION 1..8: note = Synthetic
GAYGDIVM

SEQ ID NO: 1263 - protein, 8 aa, synthetic construct
  REGION 1..8: note = Synthetic
RAGGSIPI

SEQ ID NO: 1264 - protein, 8 aa, synthetic construct
  REGION 1..8: note = Synthetic
KKPSQSAT

SEQ ID NO: 1265 - protein, 8 aa, synthetic construct
  REGION 1..8: note = Synthetic
VALPTVSP

SEQ ID NO: 1266 - protein, 8 aa, synthetic construct
  REGION 1..8: note = Synthetic
NKPCSKQP

SEQ ID NO: 1267 - protein, 8 aa, synthetic construct
  REGION 1..8: note = Synthetic
GLDKVPKD

SEQ ID NO: 1268 - protein, 8 aa, synthetic construct
  REGION 1..8: note = Synthetic
HPVELLAR

SEQ ID NO: 1269 - protein, 8 aa, synthetic construct
  REGION 1..8: note = Synthetic
LGYPIKAP

SEQ ID NO: 1270 - protein, 8 aa, synthetic construct
  REGION 1..8: note = Synthetic
PGVVGVPG

SEQ ID NO: 1271 - protein, 8 aa, synthetic construct
  REGION 1..8: note = Synthetic
GVRGLTGP

SEQ ID NO: 1272 - protein, 8 aa, synthetic construct
  REGION 1..8: note = Synthetic
SDGLPGLK

SEQ ID NO: 1273 - protein, 8 aa, synthetic construct
  REGION 1..8: note = Synthetic
QAKNISQD

SEQ ID NO: 1274 - protein, 8 aa, synthetic construct
  REGION 1..8: note = Synthetic
PGVRLLQD

SEQ ID NO: 1275 - protein, 8 aa, synthetic construct
  REGION 1..8: note = Synthetic
QGLQGLPG

SEQ ID NO: 1276 - protein, 8 aa, synthetic construct
  REGION 1..8: note = Synthetic
DPGEILGH

SEQ ID NO: 1277 - protein, 8 aa, synthetic construct
  REGION 1..8: note = Synthetic
PPGPPGDI

SEQ ID NO: 1278 - protein, 8 aa, synthetic construct
  REGION 1..8: note = Synthetic
GRLVDTGP

SEQ ID NO: 1279 - protein, 8 aa, synthetic construct
  REGION 1..8: note = Synthetic
ADSGEGDF

SEQ ID NO: 1280 - protein, 8 aa, synthetic construct
  REGION 1..8: note = Synthetic
AWTADSGE

SEQ ID NO: 1281 - protein, 8 aa, synthetic construct
  REGION 1..8: note = Synthetic
SPEAQAAA

SEQ ID NO: 1282 - protein, 8 aa, synthetic construct
  REGION 1..8: note = Synthetic
DMSRKAFV

SEQ ID NO: 1283 - protein, 8 aa, synthetic construct
  REGION 1..8: note = Synthetic
GPGGVAAA

SEQ ID NO: 1284 - protein, 8 aa, synthetic construct
  REGION 1..8: note = Synthetic
GAKGYRGP

SEQ ID NO: 1285 - protein, 8 aa, synthetic construct
  REGION 1..8: note = Synthetic
GPSGHMGR

SEQ ID NO: 1286 - protein, 8 aa, synthetic construct
  REGION 1..8: note = Synthetic
STGRNGFK

SEQ ID NO: 1287 - protein, 8 aa, synthetic construct
  REGION 1..8: note = Synthetic
LPSRSSKI

SEQ ID NO: 1288 - protein, 8 aa, synthetic construct
  REGION 1..8: note = Synthetic
FESKSYKM

SEQ ID NO: 1289 - protein, 8 aa, synthetic construct
  REGION 1..8: note = Synthetic
HEREHILG

SEQ ID NO: 1290 - protein, 8 aa, synthetic construct
  REGION 1..8: note = Synthetic
GNRGPRGE

SEQ ID NO: 1291 - protein, 8 aa, synthetic construct
  REGION 1..8: note = Synthetic
FSPFRSSR

SEQ ID NO: 1292 - protein, 8 aa, synthetic construct
  REGION 1..8: note = Synthetic
LNNRQIRG

SEQ ID NO: 1293 - protein, 8 aa, synthetic construct
  REGION 1..8: note = Synthetic
SPFRSSRI

SEQ ID NO: 1294 - protein, 8 aa, synthetic construct
  REGION 1..8: note = Synthetic
SLLRSEET

SEQ ID NO: 1295 - protein, 8 aa, synthetic construct
  REGION 1..8: note = Synthetic
WESASLLR

SEQ ID NO: 1296 - protein, 8 aa, synthetic construct
  REGION 1..8: note = Synthetic
RQIRGLEE

SEQ ID NO: 1297 - protein, 8 aa, synthetic construct
  REGION 1..8: note = Synthetic
SLLRSEET

SEQ ID NO: 1298 - protein, 8 aa, synthetic construct
  REGION 1..8: note = Synthetic
RQIRGLEE

SEQ ID NO: 1299 - protein, 8 aa, synthetic construct
  REGION 1..8: note = Synthetic
WESASLLR

SEQ ID NO: 1300 - protein, 8 aa, synthetic construct
  REGION 1..8: note = Synthetic
TSGPNQEQ

SEQ ID NO: 1301 - protein, 8 aa, synthetic construct
  REGION 1..8: note = Synthetic
EKQRKHNL

SEQ ID NO: 1302 - protein, 8 aa, synthetic construct
  REGION 1..8: note = Synthetic
SLLRSEET

SEQ ID NO: 1303 - protein, 8 aa, synthetic construct
  REGION 1..8: note = Synthetic
WESASLLR

SEQ ID NO: 1304 - protein, 8 aa, synthetic construct
  REGION 1..8: note = Synthetic
LGSKINVK

SEQ ID NO: 1305 - protein, 8 aa, synthetic construct
  REGION 1..8: note = Synthetic
RQIRGLEE

SEQ ID NO: 1306 - protein, 8 aa, synthetic construct
  REGION 1..8: note = Synthetic
WESASLLR

SEQ ID NO: 1307 - protein, 8 aa, synthetic construct
  REGION 1..8: note = Synthetic
LNNRQIRG

SEQ ID NO: 1308 - protein, 8 aa, synthetic construct
  REGION 1..8: note = Synthetic
SRIVRSLM

SEQ ID NO: 1309 - protein, 8 aa, synthetic construct
  REGION 1..8: note = Synthetic
ESKSYKMA

SEQ ID NO: 1310 - protein, 8 aa, synthetic construct
  REGION 1..8: note = Synthetic
SKSYKMAD

SEQ ID NO: 1311 - protein, 8 aa, synthetic construct
  REGION 1..8: note = Synthetic
PSRGKSSS

SEQ ID NO: 1312 - protein, 8 aa, synthetic construct
  REGION 1..8: note = Synthetic
SYKMADEA

SEQ ID NO: 1313 - protein, 8 aa, synthetic construct
  REGION 1..8: note = Synthetic
GGVRGPRV

SEQ ID NO: 1314 - protein, 8 aa, synthetic construct
  REGION 1..8: note = Synthetic
GGVRGPRV

SEQ ID NO: 1315 - protein, 8 aa, synthetic construct
  REGION 1..8: note = Synthetic
GGGVRGPR

SEQ ID NO: 1316 - protein, 8 aa, synthetic construct
  REGION 1..8: note = Synthetic
ANNRDNTY

SEQ ID NO: 1317 - protein, 8 aa, synthetic construct
  REGION 1..8: note = Synthetic
YKMADEAG

SEQ ID NO: 1318 - protein, 8 aa, synthetic construct
  REGION 1..8: note = Synthetic
GGGVRGPR

SEQ ID NO: 1319 - protein, 8 aa, synthetic construct
  REGION 1..8: note = Synthetic
MRMELERP

SEQ ID NO: 1320 - protein, 8 aa, synthetic construct
  REGION 1..8: note = Synthetic
GGVRGPRV

SEQ ID NO: 1321 - protein, 8 aa, synthetic construct
  REGION 1..8: note = Synthetic
SSGPGSTG

SEQ ID NO: 1322 - protein, 8 aa, synthetic construct
  REGION 1..8: note = Synthetic
GGVRGPRV

SEQ ID NO: 1323 - protein, 8 aa, synthetic construct
  REGION 1..8: note = Synthetic
YKMADEAG

SEQ ID NO: 1324 - protein, 8 aa, synthetic construct
  REGION 1..8: note = Synthetic
TFESKSYK

SEQ ID NO: 1325 - protein, 8 aa, synthetic construct
  REGION 1..8: note = Synthetic
PRVVERHQ

SEQ ID NO: 1326 - protein, 8 aa, synthetic construct
  REGION 1..8: note = Synthetic
PEWKALTD

SEQ ID NO: 1327 - protein, 8 aa, synthetic construct
  REGION 1..8: note = Synthetic
GNFKSQLQ

SEQ ID NO: 1328 - protein, 8 aa, synthetic construct
  REGION 1..8: note = Synthetic
GGVRGPRV

SEQ ID NO: 1329 - protein, 8 aa, synthetic construct
  REGION 1..8: note = Synthetic
GPRVVERH

SEQ ID NO: 1330 - protein, 8 aa, synthetic construct
  REGION 1..8: note = Synthetic
PSRGKSSS

SEQ ID NO: 1331 - protein, 8 aa, synthetic construct
  REGION 1..8: note = Synthetic
GNFKSQLQ

SEQ ID NO: 1332 - protein, 8 aa, synthetic construct
  REGION 1..8: note = Synthetic
SQLQKVPP

SEQ ID NO: 1333 - protein, 8 aa, synthetic construct
  REGION 1..8: note = Synthetic
SSGPGSTG

SEQ ID NO: 1334 - protein, 8 aa, synthetic construct
  REGION 1..8: note = Synthetic
MRMELERP

SEQ ID NO: 1335 - protein, 8 aa, synthetic construct
  REGION 1..8: note = Synthetic
PSRGKSSS

SEQ ID NO: 1336 - protein, 8 aa, synthetic construct
  REGION 1..8: note = Synthetic
PRVVERHQ

SEQ ID NO: 1337 - protein, 8 aa, synthetic construct
  REGION 1..8: note = Synthetic
SANNRDNT

SEQ ID NO: 1338 - protein, 8 aa, synthetic construct
  REGION 1..8: note = Synthetic
RVVERHQS

SEQ ID NO: 1339 - protein, 8 aa, synthetic construct
  REGION 1..8: note = Synthetic
KALTDMPQ

SEQ ID NO: 1340 - protein, 8 aa, synthetic construct
  REGION 1..8: note = Synthetic
WGTFEEVS

SEQ ID NO: 1341 - protein, 8 aa, synthetic construct
  REGION 1..8: note = Synthetic
PGNFKSQL

SEQ ID NO: 1342 - protein, 8 aa, synthetic construct
  REGION 1..8: note = Synthetic
SPRNPSSA

SEQ ID NO: 1343 - protein, 8 aa, synthetic construct
  REGION 1..8: note = Synthetic
PGNFKSQL

SEQ ID NO: 1344 - protein, 8 aa, synthetic construct
  REGION 1..8: note = Synthetic
PQMRMELE

SEQ ID NO: 1345 - protein, 8 aa, synthetic construct
  REGION 1..8: note = Synthetic
ERHQSACK

SEQ ID NO: 1346 - protein, 8 aa, synthetic construct
  REGION 1..8: note = Synthetic
KALTDMPQ

SEQ ID NO: 1347 - protein, 8 aa, synthetic construct
  REGION 1..8: note = Synthetic
TFESKSYK

SEQ ID NO: 1348 - protein, 8 aa, synthetic construct
  REGION 1..8: note = Synthetic
PSRGKSSS

SEQ ID NO: 1349 - protein, 8 aa, synthetic construct
  REGION 1..8: note = Synthetic
GNRNPGSS

SEQ ID NO: 1350 - protein, 8 aa, synthetic construct
  REGION 1..8: note = Synthetic
SKSYKMAD

SEQ ID NO: 1351 - protein, 8 aa, synthetic construct
  REGION 1..8: note = Synthetic
WGTFEEVS

SEQ ID NO: 1352 - protein, 8 aa, synthetic construct
  REGION 1..8: note = Synthetic
PSRGKSSS

SEQ ID NO: 1353 - protein, 8 aa, synthetic construct
  REGION 1..8: note = Synthetic
MELERPGG

SEQ ID NO: 1354 - protein, 8 aa, synthetic construct
  REGION 1..8: note = Synthetic
LVTSKGDK

SEQ ID NO: 1355 - protein, 8 aa, synthetic construct
  REGION 1..8: note = Synthetic
GSWNSGSS

SEQ ID NO: 1356 - protein, 8 aa, synthetic construct
  REGION 1..8: note = Synthetic
TFPGFFSP

SEQ ID NO: 1357 - protein, 8 aa, synthetic construct
  REGION 1..8: note = Synthetic
RGHAKSRP

SEQ ID NO: 1358 - protein, 8 aa, synthetic construct
  REGION 1..8: note = Synthetic
PGNFKSQL

SEQ ID NO: 1359 - protein, 8 aa, synthetic construct
  REGION 1..8: note = Synthetic
LAHQSNST

SEQ ID NO: 1360 - protein, 8 aa, synthetic construct
  REGION 1..8: note = Synthetic
LAHQSNST

SEQ ID NO: 1361 - protein, 8 aa, synthetic construct
  REGION 1..8: note = Synthetic
AHQSNSTN

SEQ ID NO: 1362 - protein, 8 aa, synthetic construct
  REGION 1..8: note = Synthetic
AHQSNSTN

SEQ ID NO: 1363 - protein, 8 aa, synthetic construct
  REGION 1..8: note = Synthetic
QLAHQSNS

SEQ ID NO: 1364 - protein, 8 aa, synthetic construct
  REGION 1..8: note = Synthetic
QLAHQSNS

SEQ ID NO: 1365 - protein, 8 aa, synthetic construct
  REGION 1..8: note = Synthetic
RQLAHQSN

SEQ ID NO: 1366 - protein, 8 aa, synthetic construct
  REGION 1..8: note = Synthetic
LAHQSNST

SEQ ID NO: 1367 - protein, 8 aa, synthetic construct
  REGION 1..8: note = Synthetic
QVVKGSVF

SEQ ID NO: 1368 - protein, 8 aa, synthetic construct
  REGION 1..8: note = Synthetic
VPRGQVVK

SEQ ID NO: 1369 - protein, 8 aa, synthetic construct
  REGION 1..8: note = Synthetic
PSRNNVPC

SEQ ID NO: 1370 - protein, 8 aa, synthetic construct
  REGION 1..8: note = Synthetic
SRNNVPCS

SEQ ID NO: 1371 - protein, 8 aa, synthetic construct
  REGION 1..8: note = Synthetic
VPLSVGVQ

SEQ ID NO: 1372 - protein, 8 aa, synthetic construct
  REGION 1..8: note = Synthetic
GSVFLRNP

SEQ ID NO: 1373 - protein, 8 aa, synthetic construct
  REGION 1..8: note = Synthetic
VQLQDVPR

SEQ ID NO: 1374 - protein, 8 aa, synthetic construct
  REGION 1..8: note = Synthetic
VGVQLQDV

SEQ ID NO: 1375 - protein, 8 aa, synthetic construct
  REGION 1..8: note = Synthetic
NRQIRGLE

SEQ ID NO: 1376 - protein, 8 aa, synthetic construct
  REGION 1..8: note = Synthetic
VHLGVPLS

SEQ ID NO: 1377 - protein, 8 aa, synthetic construct
  REGION 1..8: note = Synthetic
RQIRGLEE

SEQ ID NO: 1378 - protein, 8 aa, synthetic construct
  REGION 1..8: note = Synthetic
GRRNRRRR

SEQ ID NO: 1379 - protein, 8 aa, synthetic construct
  REGION 1..8: note = Synthetic
SVVHLGVP

SEQ ID NO: 1380 - protein, 8 aa, synthetic construct
  REGION 1..8: note = Synthetic
INVKVGGN

SEQ ID NO: 1381 - protein, 8 aa, synthetic construct
  REGION 1..8: note = Synthetic
PVTPLQLF

SEQ ID NO: 1382 - protein, 8 aa, synthetic construct
  REGION 1..8: note = Synthetic
PVTPLQLF

SEQ ID NO: 1383 - protein, 8 aa, synthetic construct
  REGION 1..8: note = Synthetic
NRQIRGLE

SEQ ID NO: 1384 - protein, 8 aa, synthetic construct
  REGION 1..8: note = Synthetic
TPLQLFEG

SEQ ID NO: 1385 - protein, 8 aa, synthetic construct
  REGION 1..8: note = Synthetic
VFLRNPSR

SEQ ID NO: 1386 - protein, 8 aa, synthetic construct
  REGION 1..8: note = Synthetic
PLQLFEGR

SEQ ID NO: 1387 - protein, 8 aa, synthetic construct
  REGION 1..8: note = Synthetic
LGSKINVK

SEQ ID NO: 1388 - protein, 8 aa, synthetic construct
  REGION 1..8: note = Synthetic
VRVTASDP

SEQ ID NO: 1389 - protein, 8 aa, synthetic construct
  REGION 1..8: note = Synthetic
VGVQLQDV

SEQ ID NO: 1390 - protein, 8 aa, synthetic construct
  REGION 1..8: note = Synthetic
ARLTVAAP

SEQ ID NO: 1391 - protein, 8 aa, synthetic construct
  REGION 1..8: note = Synthetic
PRVGDTLN

SEQ ID NO: 1392 - protein, 8 aa, synthetic construct
  REGION 1..8: note = Synthetic
VPLSVGVQ

SEQ ID NO: 1393 - protein, 8 aa, synthetic construct
  REGION 1..8: note = Synthetic
GRRNRRRR

SEQ ID NO: 1394 - protein, 8 aa, synthetic construct
  REGION 1..8: note = Synthetic
GRRNRRRR

SEQ ID NO: 1395 - protein, 8 aa, synthetic construct
  REGION 1..8: note = Synthetic
VPLSVGVQ

SEQ ID NO: 1396 - protein, 8 aa, synthetic construct
  REGION 1..8: note = Synthetic
GRRNRRRR

SEQ ID NO: 1397 - protein, 8 aa, synthetic construct
  REGION 1..8: note = Synthetic
QVVKGSVF

SEQ ID NO: 1398 - protein, 8 aa, synthetic construct
  REGION 1..8: note = Synthetic
VHLGVPLS

SEQ ID NO: 1399 - protein, 8 aa, synthetic construct
  REGION 1..8: note = Synthetic
PRVGDTLN

SEQ ID NO: 1400 - protein, 8 aa, synthetic construct
  REGION 1..8: note = Synthetic
GGGYRARP

SEQ ID NO: 1401 - protein, 8 aa, synthetic construct
  REGION 1..8: note = Synthetic
GGGYRARP

SEQ ID NO: 1402 - protein, 8 aa, synthetic construct
  REGION 1..8: note = Synthetic
GGGYRARP

SEQ ID NO: 1403 - protein, 8 aa, synthetic construct
  REGION 1..8: note = Synthetic
GGGYRARP

SEQ ID NO: 1404 - protein, 8 aa, synthetic construct
  REGION 1..8: note = Synthetic
FSARGHRP

SEQ ID NO: 1405 - protein, 8 aa, synthetic construct
  REGION 1..8: note = Synthetic
ARGHRPLD

SEQ ID NO: 1406 - protein, 8 aa, synthetic construct
  REGION 1..8: note = Synthetic
FFSARGHR

SEQ ID NO: 1407 - protein, 8 aa, synthetic construct
  REGION 1..8: note = Synthetic
KKREEAPS

SEQ ID NO: 1408 - protein, 8 aa, synthetic construct
  REGION 1..8: note = Synthetic
GGGYRARP

SEQ ID NO: 1409 - protein, 8 aa, synthetic construct
  REGION 1..8: note = Synthetic
GGYRARPA

SEQ ID NO: 1410 - protein, 8 aa, synthetic construct
  REGION 1..8: note = Synthetic
RPLDKKRE

SEQ ID NO: 1411 - protein, 8 aa, synthetic construct
  REGION 1..8: note = Synthetic
GGGYRARP

SEQ ID NO: 1412 - protein, 8 aa, synthetic construct
  REGION 1..8: note = Synthetic
DKKREEAP

SEQ ID NO: 1413 - protein, 8 aa, synthetic construct
  REGION 1..8: note = Synthetic
FFSARGHR

SEQ ID NO: 1414 - protein, 8 aa, synthetic construct
  REGION 1..8: note = Synthetic
RPAKAAAT

SEQ ID NO: 1415 - protein, 8 aa, synthetic construct
  REGION 1..8: note = Synthetic
GFFSARGH

SEQ ID NO: 1416 - protein, 8 aa, synthetic construct
  REGION 1..8: note = Synthetic
RPLDKKRE

SEQ ID NO: 1417 - protein, 8 aa, synthetic construct
  REGION 1..8: note = Synthetic
GGYRARPA

SEQ ID NO: 1418 - protein, 8 aa, synthetic construct
  REGION 1..8: note = Synthetic
PLDKKREE

SEQ ID NO: 1419 - protein, 8 aa, synthetic construct
  REGION 1..8: note = Synthetic
APSLRPAP

SEQ ID NO: 1420 - protein, 8 aa, synthetic construct
  REGION 1..8: note = Synthetic
EAPSLRPA

SEQ ID NO: 1421 - protein, 8 aa, synthetic construct
  REGION 1..8: note = Synthetic
LDKKREEA

SEQ ID NO: 1422 - protein, 8 aa, synthetic construct
  REGION 1..8: note = Synthetic
FFSARGHR

SEQ ID NO: 1423 - protein, 8 aa, synthetic construct
  REGION 1..8: note = Synthetic
GGYRARPA

SEQ ID NO: 1424 - protein, 8 aa, synthetic construct
  REGION 1..8: note = Synthetic
GGGYRARP

SEQ ID NO: 1425 - protein, 8 aa, synthetic construct
  REGION 1..8: note = Synthetic
RPLDKKRE

SEQ ID NO: 1426 - protein, 8 aa, synthetic construct
  REGION 1..8: note = Synthetic
RARPAKAA

SEQ ID NO: 1427 - protein, 8 aa, synthetic construct
  REGION 1..8: note = Synthetic
AKAAATQK

SEQ ID NO: 1428 - protein, 8 aa, synthetic construct
  REGION 1..8: note = Synthetic
FFSARGHR

SEQ ID NO: 1429 - protein, 8 aa, synthetic construct
  REGION 1..8: note = Synthetic
PPISGGGY

SEQ ID NO: 1430 - protein, 8 aa, synthetic construct
  REGION 1..8: note = Synthetic
KREEAPSL

SEQ ID NO: 1431 - protein, 8 aa, synthetic construct
  REGION 1..8: note = Synthetic
ARPAKAAA

SEQ ID NO: 1432 - protein, 8 aa, synthetic construct
  REGION 1..8: note = Synthetic
EAFDGARD

SEQ ID NO: 1433 - protein, 8 aa, synthetic construct
  REGION 1..8: note = Synthetic
KRGPGGVW

SEQ ID NO: 1434 - protein, 8 aa, synthetic construct
  REGION 1..8: note = Synthetic
KRGPGGVW

SEQ ID NO: 1435 - protein, 5 aa, synthetic construct
  REGION 1..5: note = Synthetic
LPEKY

SEQ ID NO: 1436 - protein, 8 aa, synthetic construct
  REGION 1..8: note = Synthetic
KRGPGGVW

SEQ ID NO: 1437 - protein, 8 aa, synthetic construct
  REGION 1..8: note = Synthetic
FRPAGLPE

SEQ ID NO: 1438 - protein, 8 aa, synthetic construct
  REGION 1..8: note = Synthetic
GAEDSLAD

SEQ ID NO: 1439 - protein, 8 aa, synthetic construct
  REGION 1..8: note = Synthetic
KRGPGGVW

SEQ ID NO: 1440 - protein, 8 aa, synthetic construct
  REGION 1..8: note = Synthetic
FSFLGEAF

SEQ ID NO: 1441 - protein, 5 aa, synthetic construct
  REGION 1..5: note = Synthetic
TNPKE

SEQ ID NO: 1442 - protein, 8 aa, synthetic construct
  REGION 1..8: note = Synthetic
TALKSPPG

SEQ ID NO: 1443 - protein, 8 aa, synthetic construct
  REGION 1..8: note = Synthetic
TLLKLGNQ

SEQ ID NO: 1444 - protein, 8 aa, synthetic construct
  REGION 1..8: note = Synthetic
TALKSPPG

SEQ ID NO: 1445 - protein, 8 aa, synthetic construct
  REGION 1..8: note = Synthetic
TLLKLGNQ

SEQ ID NO: 1446 - protein, 8 aa, synthetic construct
  REGION 1..8: note = Synthetic
TSGPNQEQ

SEQ ID NO: 1447 - protein, 8 aa, synthetic construct
  REGION 1..8: note = Synthetic
TSGPNQEQ

SEQ ID NO: 1448 - protein, 8 aa, synthetic construct
  REGION 1..8: note = Synthetic
TLLKLGNQ

SEQ ID NO: 1449 - protein, 8 aa, synthetic construct
  REGION 1..8: note = Synthetic
LKLGNQEP

SEQ ID NO: 1450 - protein, 8 aa, synthetic construct
  REGION 1..8: note = Synthetic
KEQQDSPG

SEQ ID NO: 1451 - protein, 8 aa, synthetic construct
  REGION 1..8: note = Synthetic
PLTLLKLG

SEQ ID NO: 1452 - protein, 8 aa, synthetic construct
  REGION 1..8: note = Synthetic
GKQLNLKL

SEQ ID NO: 1453 - protein, 8 aa, synthetic construct
  REGION 1..8: note = Synthetic
DVLKDSGR

SEQ ID NO: 1454 - protein, 8 aa, synthetic construct
  REGION 1..8: note = Synthetic
RQEMSKDL

SEQ ID NO: 1455 - protein, 8 aa, synthetic construct
  REGION 1..8: note = Synthetic
RVKDLATV

SEQ ID NO: 1456 - protein, 8 aa, synthetic construct
  REGION 1..8: note = Synthetic
HELQEKLS

SEQ ID NO: 1457 - protein, 8 aa, synthetic construct
  REGION 1..8: note = Synthetic
SPLGEEMR

SEQ ID NO: 1458 - protein, 8 aa, synthetic construct
  REGION 1..8: note = Synthetic
ATVYVDVL

SEQ ID NO: 1459 - protein, 8 aa, synthetic construct
  REGION 1..8: note = Synthetic
ENLTQENQ

SEQ ID NO: 1460 - protein, 8 aa, synthetic construct
  REGION 1..8: note = Synthetic
LGLASANV

SEQ ID NO: 1461 - protein, 8 aa, synthetic construct
  REGION 1..8: note = Synthetic
MNEDKRHS

SEQ ID NO: 1462 - protein, 8 aa, synthetic construct
  REGION 1..8: note = Synthetic
QMNEDKRH

SEQ ID NO: 1463 - protein, 8 aa, synthetic construct
  REGION 1..8: note = Synthetic
MNEDKRHS

SEQ ID NO: 1464 - protein, 8 aa, synthetic construct
  REGION 1..8: note = Synthetic
MNEDKRHS

SEQ ID NO: 1465 - protein, 8 aa, synthetic construct
  REGION 1..8: note = Synthetic
RAQDFVQW

SEQ ID NO: 1466 - protein, 8 aa, synthetic construct
  REGION 1..8: note = Synthetic
QMNEDKRH

SEQ ID NO: 1467 - protein, 8 aa, synthetic construct
  REGION 1..8: note = Synthetic
LMNTKRNR

SEQ ID NO: 1468 - protein, 8 aa, synthetic construct
  REGION 1..8: note = Synthetic
MNEDKRHS

SEQ ID NO: 1469 - protein, 8 aa, synthetic construct
  REGION 1..8: note = Synthetic
QMNEDKRH

SEQ ID NO: 1470 - protein, 6 aa, synthetic construct
  REGION 1..6: note = Synthetic
KITDRK

SEQ ID NO: 1471 - protein, 8 aa, synthetic construct
  REGION 1..8: note = Synthetic
KGRGRRDF

SEQ ID NO: 1472 - protein, 8 aa, synthetic construct
  REGION 1..8: note = Synthetic
PMFQRRRR

SEQ ID NO: 1473 - protein, 8 aa, synthetic construct
  REGION 1..8: note = Synthetic
WMPMFQRR

SEQ ID NO: 1474 - protein, 8 aa, synthetic construct
  REGION 1..8: note = Synthetic
SWMPMFQR

SEQ ID NO: 1475 - protein, 8 aa, synthetic construct
  REGION 1..8: note = Synthetic
GARASWMP

SEQ ID NO: 1476 - protein, 8 aa, synthetic construct
  REGION 1..8: note = Synthetic
ARASWMPM

SEQ ID NO: 1477 - protein, 8 aa, synthetic construct
  REGION 1..8: note = Synthetic
RAGARASW

SEQ ID NO: 1478 - protein, 8 aa, synthetic construct
  REGION 1..8: note = Synthetic
ARASWMPM

SEQ ID NO: 1479 - protein, 8 aa, synthetic construct
  REGION 1..8: note = Synthetic
ARASWMPM

SEQ ID NO: 1480 - protein, 8 aa, synthetic construct
  REGION 1..8: note = Synthetic
RAGARASW

SEQ ID NO: 1481 - protein, 8 aa, synthetic construct
  REGION 1..8: note = Synthetic
QLAELQPQ

SEQ ID NO: 1482 - protein, 8 aa, synthetic construct
  REGION 1..8: note = Synthetic
AGARASWM

SEQ ID NO: 1483 - protein, 8 aa, synthetic construct
  REGION 1..8: note = Synthetic
ELQPQDRA

SEQ ID NO: 1484 - protein, 8 aa, synthetic construct
  REGION 1..8: note = Synthetic
DPNHFRPA

SEQ ID NO: 1485 - protein, 8 aa, synthetic construct
  REGION 1..8: note = Synthetic
DPNHFRPA

SEQ ID NO: 1486 - protein, 8 aa, synthetic construct
  REGION 1..8: note = Synthetic
DPNHFRPA

SEQ ID NO: 1487 - protein, 8 aa, synthetic construct
  REGION 1..8: note = Synthetic
AEVISNAR

SEQ ID NO: 1488 - protein, 8 aa, synthetic construct
  REGION 1..8: note = Synthetic
KSKLKKTE

SEQ ID NO: 1489 - protein, 8 aa, synthetic construct
  REGION 1..8: note = Synthetic
KKTETQEK

SEQ ID NO: 1490 - protein, 8 aa, synthetic construct
  REGION 1..8: note = Synthetic
ETQEKNPL

SEQ ID NO: 1491 - protein, 8 aa, synthetic construct
  REGION 1..8: note = Synthetic
MVSHHNLT

SEQ ID NO: 1492 - protein, 8 aa, synthetic construct
  REGION 1..8: note = Synthetic
VSHHNLTT

SEQ ID NO: 1493 - protein, 8 aa, synthetic construct
  REGION 1..8: note = Synthetic
AKMVSHHN

SEQ ID NO: 1494 - protein, 8 aa, synthetic construct
  REGION 1..8: note = Synthetic
FPWQAKMV

SEQ ID NO: 1495 - protein, 8 aa, synthetic construct
  REGION 1..8: note = Synthetic
LWGQLFAV

SEQ ID NO: 1496 - protein, 8 aa, synthetic construct
  REGION 1..8: note = Synthetic
LWGQLFAV

SEQ ID NO: 1497 - protein, 8 aa, synthetic construct
  REGION 1..8: note = Synthetic
LERMFLSF

SEQ ID NO: 1498 - protein, 8 aa, synthetic construct
  REGION 1..8: note = Synthetic
ERMFLSFP

SEQ ID NO: 1499 - protein, 8 aa, synthetic construct
  REGION 1..8: note = Synthetic
FLSFPTTK

SEQ ID NO: 1500 - protein, 8 aa, synthetic construct
  REGION 1..8: note = Synthetic
GKVGAHAG

SEQ ID NO: 1501 - protein, 8 aa, synthetic construct
  REGION 1..8: note = Synthetic
SDMRQEKP

SEQ ID NO: 1502 - protein, 8 aa, synthetic construct
  REGION 1..8: note = Synthetic
QHPGSDMR

SEQ ID NO: 1503 - protein, 8 aa, synthetic construct
  REGION 1..8: note = Synthetic
GSDMRQEK

SEQ ID NO: 1504 - protein, 8 aa, synthetic construct
  REGION 1..8: note = Synthetic
HVLLAAPP

SEQ ID NO: 1505 - protein, 8 aa, synthetic construct
  REGION 1..8: note = Synthetic
VLLAAPPG

SEQ ID NO: 1506 - protein, 8 aa, synthetic construct
  REGION 1..8: note = Synthetic
PRKTRTVV

SEQ ID NO: 1507 - protein, 8 aa, synthetic construct
  REGION 1..8: note = Synthetic
PRKTRTVV

SEQ ID NO: 1508 - protein, 8 aa, synthetic construct
  REGION 1..8: note = Synthetic
PRKTRTVV

SEQ ID NO: 1509 - protein, 8 aa, synthetic construct
  REGION 1..8: note = Synthetic
SHVLLAAP

SEQ ID NO: 1510 - protein, 8 aa, synthetic construct
  REGION 1..8: note = Synthetic
SHPRKTRT

SEQ ID NO: 1511 - protein, 8 aa, synthetic construct
  REGION 1..8: note = Synthetic
KDVMEKRE

SEQ ID NO: 1512 - protein, 8 aa, synthetic construct
  REGION 1..8: note = Synthetic
DVMEKRED

SEQ ID NO: 1513 - protein, 5 aa, synthetic construct
  REGION 1..5: note = Synthetic
ALRRG

SEQ ID NO: 1514 - protein, 8 aa, synthetic construct
  REGION 1..8: note = Synthetic
KDVMEKRE

SEQ ID NO: 1515 - protein, 8 aa, synthetic construct
  REGION 1..8: note = Synthetic
GPQLRRGW

SEQ ID NO: 1516 - protein, 8 aa, synthetic construct
  REGION 1..8: note = Synthetic
KLSFRARA

SEQ ID NO: 1517 - protein, 8 aa, synthetic construct
  REGION 1..8: note = Synthetic
SLLRSEET

SEQ ID NO: 1518 - protein, 8 aa, synthetic construct
  REGION 1..8: note = Synthetic
ASLLRSEE

SEQ ID NO: 1519 - protein, 8 aa, synthetic construct
  REGION 1..8: note = Synthetic
ASLLRSEE

SEQ ID NO: 1520 - protein, 8 aa, synthetic construct
  REGION 1..8: note = Synthetic
ASLLRSEE

SEQ ID NO: 1521 - protein, 8 aa, synthetic construct
  REGION 1..8: note = Synthetic
HDAQGDVP

SEQ ID NO: 1522 - protein, 8 aa, synthetic construct
  REGION 1..8: note = Synthetic
ASLLRSEE

SEQ ID NO: 1523 - protein, 8 aa, synthetic construct
  REGION 1..8: note = Synthetic
ASLLRSEE

SEQ ID NO: 1524 - protein, 8 aa, synthetic construct
  REGION 1..8: note = Synthetic
ASLLRSEE

SEQ ID NO: 1525 - protein, 8 aa, synthetic construct
  REGION 1..8: note = Synthetic
ASLLRSEE

SEQ ID NO: 1526 - protein, 8 aa, synthetic construct
  REGION 1..8: note = Synthetic
PSLAKKQR

SEQ ID NO: 1527 - protein, 8 aa, synthetic construct
  REGION 1..8: note = Synthetic
IYISGMAP

SEQ ID NO: 1528 - protein, 8 aa, synthetic construct
  REGION 1..8: note = Synthetic
KPEGIDSR

SEQ ID NO: 1529 - protein, 8 aa, synthetic construct
  REGION 1..8: note = Synthetic
PSLAKKQR

SEQ ID NO: 1530 - protein, 8 aa, synthetic construct
  REGION 1..8: note = Synthetic
APRPSLAK

SEQ ID NO: 1531 - protein, 8 aa, synthetic construct
  REGION 1..8: note = Synthetic
PSLAKKQR

SEQ ID NO: 1532 - protein, 8 aa, synthetic construct
  REGION 1..8: note = Synthetic
PRPSLAKK

SEQ ID NO: 1533 - protein, 8 aa, synthetic construct
  REGION 1..8: note = Synthetic
KLLQDEFP

SEQ ID NO: 1534 - protein, 8 aa, synthetic construct
  REGION 1..8: note = Synthetic
PPEKKEKG

SEQ ID NO: 1535 - protein, 8 aa, synthetic construct
  REGION 1..8: note = Synthetic
EKKEKGYP

SEQ ID NO: 1536 - protein, 8 aa, synthetic construct
  REGION 1..8: note = Synthetic
QGHNSVFL

SEQ ID NO: 1537 - protein, 8 aa, synthetic construct
  REGION 1..8: note = Synthetic
YPPEKKEK

SEQ ID NO: 1538 - protein, 8 aa, synthetic construct
  REGION 1..8: note = Synthetic
KLLQDEFP

SEQ ID NO: 1539 - protein, 8 aa, synthetic construct
  REGION 1..8: note = Synthetic
QSQTQPVS

SEQ ID NO: 1540 - protein, 8 aa, synthetic construct
  REGION 1..8: note = Synthetic
PVASKFSP

SEQ ID NO: 1541 - protein, 8 aa, synthetic construct
  REGION 1..8: note = Synthetic
LHVQSQTQ

SEQ ID NO: 1542 - protein, 8 aa, synthetic construct
  REGION 1..8: note = Synthetic
APAFYAPQ

SEQ ID NO: 1543 - protein, 8 aa, synthetic construct
  REGION 1..8: note = Synthetic
QPVSLANT

SEQ ID NO: 1544 - protein, 8 aa, synthetic construct
  REGION 1..8: note = Synthetic
QRAQMGRV

SEQ ID NO: 1545 - protein, 8 aa, synthetic construct
  REGION 1..8: note = Synthetic
TAKDALSS

SEQ ID NO: 1546 - protein, 8 aa, synthetic construct
  REGION 1..8: note = Synthetic
TKTAKDAL

SEQ ID NO: 1547 - protein, 8 aa, synthetic construct
  REGION 1..8: note = Synthetic
AQQARGWV

SEQ ID NO: 1548 - protein, 8 aa, synthetic construct
  REGION 1..8: note = Synthetic
EHIAKRAM

SEQ ID NO: 1549 - protein, 8 aa, synthetic construct
  REGION 1..8: note = Synthetic
EHIAKRAM

SEQ ID NO: 1550 - protein, 8 aa, synthetic construct
  REGION 1..8: note = Synthetic
GREHIAKR

SEQ ID NO: 1551 - protein, 8 aa, synthetic construct
  REGION 1..8: note = Synthetic
APVSKRFP

SEQ ID NO: 1552 - protein, 8 aa, synthetic construct
  REGION 1..8: note = Synthetic
APVSKRFP

SEQ ID NO: 1553 - protein, 8 aa, synthetic construct
  REGION 1..8: note = Synthetic
DGLSVEDI

SEQ ID NO: 1554 - protein, 8 aa, synthetic construct
  REGION 1..8: note = Synthetic
PMYEENSR

SEQ ID NO: 1555 - protein, 8 aa, synthetic construct
  REGION 1..8: note = Synthetic
VSLKAPLT

SEQ ID NO: 1556 - protein, 8 aa, synthetic construct
  REGION 1..8: note = Synthetic
APLTKPLK

SEQ ID NO: 1557 - protein, 8 aa, synthetic construct
  REGION 1..8: note = Synthetic
SYVSLKAP

SEQ ID NO: 1558 - protein, 8 aa, synthetic construct
  REGION 1..8: note = Synthetic
QYLQQCPF

SEQ ID NO: 1559 - protein, 8 aa, synthetic construct
  REGION 1..8: note = Synthetic
ENFKALVL

SEQ ID NO: 1560 - protein, 8 aa, synthetic construct
  REGION 1..8: note = Synthetic
ALVLIAFA

SEQ ID NO: 1561 - protein, 8 aa, synthetic construct
  REGION 1..8: note = Synthetic
AVPRELSP

SEQ ID NO: 1562 - protein, 8 aa, synthetic construct
  REGION 1..8: note = Synthetic
LRRYINML

SEQ ID NO: 1563 - protein, 8 aa, synthetic construct
  REGION 1..8: note = Synthetic
RPRYGKRH

SEQ ID NO: 1564 - protein, 8 aa, synthetic construct
  REGION 1..8: note = Synthetic
RPRYGKRH

SEQ ID NO: 1565 - protein, 8 aa, synthetic construct
  REGION 1..8: note = Synthetic
VRGARNSE

SEQ ID NO: 1566 - protein, 8 aa, synthetic construct
  REGION 1..8: note = Synthetic
APEVRGAR

SEQ ID NO: 1567 - protein, 8 aa, synthetic construct
  REGION 1..8: note = Synthetic
VRGARNSE

SEQ ID NO: 1568 - protein, 8 aa, synthetic construct
  REGION 1..8: note = Synthetic
PTHVRSPQ

SEQ ID NO: 1569 - protein, 8 aa, synthetic construct
  REGION 1..8: note = Synthetic
PTHVRSPQ

SEQ ID NO: 1570 - protein, 8 aa, synthetic construct
  REGION 1..8: note = Synthetic
APEVRGAR

SEQ ID NO: 1571 - protein, 8 aa, synthetic construct
  REGION 1..8: note = Synthetic
LTETVRSQ

SEQ ID NO: 1572 - protein, 8 aa, synthetic construct
  REGION 1..8: note = Synthetic
ELPDWNEV

SEQ ID NO: 1573 - protein, 6 aa, synthetic construct
  REGION 1..6: note = Synthetic
EDTKSG

SEQ ID NO: 1574 - protein, 8 aa, synthetic construct
  REGION 1..8: note = Synthetic
WDYASDHG

SEQ ID NO: 1575 - protein, 8 aa, synthetic construct
  REGION 1..8: note = Synthetic
TNQYNNPA

SEQ ID NO: 1576 - protein, 8 aa, synthetic construct
  REGION 1..8: note = Synthetic
APVTKVAA

SEQ ID NO: 1577 - protein, 8 aa, synthetic construct
  REGION 1..8: note = Synthetic
SGVEANSR

SEQ ID NO: 1578 - protein, 8 aa, synthetic construct
  REGION 1..8: note = Synthetic
YHEQLSVA

SEQ ID NO: 1579 - protein, 8 aa, synthetic construct
  REGION 1..8: note = Synthetic
HEQLSVAE

SEQ ID NO: 1580 - protein, 8 aa, synthetic construct
  REGION 1..8: note = Synthetic
EITNACFE

SEQ ID NO: 1581 - protein, 8 aa, synthetic construct
  REGION 1..8: note = Synthetic
LGRLLVVY

SEQ ID NO: 1582 - protein, 8 aa, synthetic construct
  REGION 1..8: note = Synthetic
TQRFFESF

SEQ ID NO: 1583 - protein, 8 aa, synthetic construct
  REGION 1..8: note = Synthetic
TQRFFESF

SEQ ID NO: 1584 - protein, 8 aa, synthetic construct
  REGION 1..8: note = Synthetic
RAPRETYL

SEQ ID NO: 1585 - protein, 8 aa, synthetic construct
  REGION 1..8: note = Synthetic
RAPRETYL

SEQ ID NO: 1586 - protein, 8 aa, synthetic construct
  REGION 1..8: note = Synthetic
NRAPRETY

SEQ ID NO: 1587 - protein, 8 aa, synthetic construct
  REGION 1..8: note = Synthetic
RAPRETYL

SEQ ID NO: 1588 - protein, 8 aa, synthetic construct
  REGION 1..8: note = Synthetic
RRYQRSLP

SEQ ID NO: 1589 - protein, 8 aa, synthetic construct
  REGION 1..8: note = Synthetic
RMLADAPP

SEQ ID NO: 1590 - protein, 8 aa, synthetic construct
  REGION 1..8: note = Synthetic
PVEVSRKN

SEQ ID NO: 1591 - protein, 8 aa, synthetic construct
  REGION 1..8: note = Synthetic
ATLKSRKM

SEQ ID NO: 1592 - protein, 8 aa, synthetic construct
  REGION 1..8: note = Synthetic
HLISTQSA

SEQ ID NO: 1593 - protein, 8 aa, synthetic construct
  REGION 1..8: note = Synthetic
PSVSVAPG

SEQ ID NO: 1594 - protein, 8 aa, synthetic construct
  REGION 1..8: note = Synthetic
PSVSVAPG

SEQ ID NO: 1595 - protein, 8 aa, synthetic construct
  REGION 1..8: note = Synthetic
KKKARKSA

SEQ ID NO: 1596 - protein, 8 aa, synthetic construct
  REGION 1..8: note = Synthetic
KTPVKKKA

SEQ ID NO: 1597 - protein, 8 aa, synthetic construct
  REGION 1..8: note = Synthetic
TPVKKKAR

SEQ ID NO: 1598 - protein, 8 aa, synthetic construct
  REGION 1..8: note = Synthetic
RSASQLDA

SEQ ID NO: 1599 - protein, 8 aa, synthetic construct
  REGION 1..8: note = Synthetic
QLDARNTK

SEQ ID NO: 1600 - protein, 8 aa, synthetic construct
  REGION 1..8: note = Synthetic
PSVSVSPG

SEQ ID NO: 1601 - protein, 8 aa, synthetic construct
  REGION 1..8: note = Synthetic
PSVSVSPG

SEQ ID NO: 1602 - protein, 8 aa, synthetic construct
  REGION 1..8: note = Synthetic
PSVSAAPG

SEQ ID NO: 1603 - protein, 8 aa, synthetic construct
  REGION 1..8: note = Synthetic
PSVSAAPG

SEQ ID NO: 1604 - protein, 8 aa, synthetic construct
  REGION 1..8: note = Synthetic
PSVSEAPR

SEQ ID NO: 1605 - protein, 8 aa, synthetic construct
  REGION 1..8: note = Synthetic
PSVSEAPR

SEQ ID NO: 1606 - protein, 8 aa, synthetic construct
  REGION 1..8: note = Synthetic
PSVSVSPG

SEQ ID NO: 1607 - protein, 8 aa, synthetic construct
  REGION 1..8: note = Synthetic
GRLASPGF

SEQ ID NO: 1608 - protein, 8 aa, synthetic construct
  REGION 1..8: note = Synthetic
GTLSLSPG

SEQ ID NO: 1609 - protein, 8 aa, synthetic construct
  REGION 1..8: note = Synthetic
GTLSLSPG

SEQ ID NO: 1610 - protein, 8 aa, synthetic construct
  REGION 1..8: note = Synthetic
LPVTLGQP

SEQ ID NO: 1611 - protein, 8 aa, synthetic construct
  REGION 1..8: note = Synthetic
SPLSLPVT

SEQ ID NO: 1612 - protein, 8 aa, synthetic construct
  REGION 1..8: note = Synthetic
QSTQRLRR

SEQ ID NO: 1613 - protein, 8 aa, synthetic construct
  REGION 1..8: note = Synthetic
TQRLRRGL

SEQ ID NO: 1614 - protein, 6 aa, synthetic construct
  REGION 1..6: note = Synthetic
TQPATQ

SEQ ID NO: 1615 - protein, 6 aa, synthetic construct
  REGION 1..6: note = Synthetic
TQPATQ

SEQ ID NO: 1616 - protein, 8 aa, synthetic construct
  REGION 1..8: note = Synthetic
SPELQAEA

SEQ ID NO: 1617 - protein, 8 aa, synthetic construct
  REGION 1..8: note = Synthetic
SPVTLGQP

SEQ ID NO: 1618 - protein, 8 aa, synthetic construct
  REGION 1..8: note = Synthetic
TPLSSPVT

SEQ ID NO: 1619 - protein, 8 aa, synthetic construct
  REGION 1..8: note = Synthetic
FNPRTFGS

SEQ ID NO: 1620 - protein, 8 aa, synthetic construct
  REGION 1..8: note = Synthetic
FNPRTFGS

SEQ ID NO: 1621 - protein, 8 aa, synthetic construct
  REGION 1..8: note = Synthetic
LQRVRRAN

SEQ ID NO: 1622 - protein, 8 aa, synthetic construct
  REGION 1..8: note = Synthetic
NRPKRYNS

SEQ ID NO: 1623 - protein, 8 aa, synthetic construct
  REGION 1..8: note = Synthetic
NRPKRYNS

SEQ ID NO: 1624 - protein, 8 aa, synthetic construct
  REGION 1..8: note = Synthetic
KPLGDWAA

SEQ ID NO: 1625 - protein, 8 aa, synthetic construct
  REGION 1..8: note = Synthetic
QSKPLGDW

SEQ ID NO: 1626 - protein, 8 aa, synthetic construct
  REGION 1..8: note = Synthetic
KRRQKREW

SEQ ID NO: 1627 - protein, 8 aa, synthetic construct
  REGION 1..8: note = Synthetic
KRRQKREW

SEQ ID NO: 1628 - protein, 8 aa, synthetic construct
  REGION 1..8: note = Synthetic
PHPFAVVP

SEQ ID NO: 1629 - protein, 8 aa, synthetic construct
  REGION 1..8: note = Synthetic
PHPFAVVP

SEQ ID NO: 1630 - protein, 8 aa, synthetic construct
  REGION 1..8: note = Synthetic
AGVETTTP

SEQ ID NO: 1631 - protein, 8 aa, synthetic construct
  REGION 1..8: note = Synthetic
SYLSLTPE

SEQ ID NO: 1632 - protein, 8 aa, synthetic construct
  REGION 1..8: note = Synthetic
SYLSLTPE

SEQ ID NO: 1633 - protein, 8 aa, synthetic construct
  REGION 1..8: note = Synthetic
FRVGASEN

SEQ ID NO: 1634 - protein, 8 aa, synthetic construct
  REGION 1..8: note = Synthetic
LRVTAAPQ

SEQ ID NO: 1635 - protein, 8 aa, synthetic construct
  REGION 1..8: note = Synthetic
SLLHTETT

SEQ ID NO: 1636 - protein, 8 aa, synthetic construct
  REGION 1..8: note = Synthetic
DKNFINNP

SEQ ID NO: 1637 - protein, 8 aa, synthetic construct
  REGION 1..8: note = Synthetic
NGGLIFAG

SEQ ID NO: 1638 - protein, 8 aa, synthetic construct
  REGION 1..8: note = Synthetic
DVDPFYYD

SEQ ID NO: 1639 - protein, 8 aa, synthetic construct
  REGION 1..8: note = Synthetic
SPLSLPVT

SEQ ID NO: 1640 - protein, 8 aa, synthetic construct
  REGION 1..8: note = Synthetic
LPVTPGEP

SEQ ID NO: 1641 - protein, 8 aa, synthetic construct
  REGION 1..8: note = Synthetic
VVPRGVNL

SEQ ID NO: 1642 - protein, 8 aa, synthetic construct
  REGION 1..8: note = Synthetic
GSLQKRGI

SEQ ID NO: 1643 - protein, 8 aa, synthetic construct
  REGION 1..8: note = Synthetic
ATLSLSPG

SEQ ID NO: 1644 - protein, 8 aa, synthetic construct
  REGION 1..8: note = Synthetic
SSLSASVG

SEQ ID NO: 1645 - protein, 8 aa, synthetic construct
  REGION 1..8: note = Synthetic
QPPQEKAH

SEQ ID NO: 1646 - protein, 8 aa, synthetic construct
  REGION 1..8: note = Synthetic
RVPRQVRL

SEQ ID NO: 1647 - protein, 8 aa, synthetic construct
  REGION 1..8: note = Synthetic
AAKVYSLF

SEQ ID NO: 1648 - protein, 8 aa, synthetic construct
  REGION 1..8: note = Synthetic
RPGGSYPA

SEQ ID NO: 1649 - protein, 8 aa, synthetic construct
  REGION 1..8: note = Synthetic
QPSRLQDP

SEQ ID NO: 1650 - protein, 8 aa, synthetic construct
  REGION 1..8: note = Synthetic
LPRLKRRD

SEQ ID NO: 1651 - protein, 8 aa, synthetic construct
  REGION 1..8: note = Synthetic
HSVSESPG

SEQ ID NO: 1652 - protein, 8 aa, synthetic construct
  REGION 1..8: note = Synthetic
HSVSESPG

SEQ ID NO: 1653 - protein, 8 aa, synthetic construct
  REGION 1..8: note = Synthetic
ATLSVSPG

SEQ ID NO: 1654 - protein, 8 aa, synthetic construct
  REGION 1..8: note = Synthetic
QQLTSPGY

SEQ ID NO: 1655 - protein, 8 aa, synthetic construct
  REGION 1..8: note = Synthetic
KKAAKKAG

SEQ ID NO: 1656 - protein, 8 aa, synthetic construct
  REGION 1..8: note = Synthetic
KLNYKPPP

SEQ ID NO: 1657 - protein, 8 aa, synthetic construct
  REGION 1..8: note = Synthetic
SRDTRRSF

SEQ ID NO: 1658 - protein, 8 aa, synthetic construct
  REGION 1..8: note = Synthetic
HHSSYVHL

SEQ ID NO: 1659 - protein, 8 aa, synthetic construct
  REGION 1..8: note = Synthetic
PSVSGSPG

SEQ ID NO: 1660 - protein, 8 aa, synthetic construct
  REGION 1..8: note = Synthetic
PSVSGSPG

SEQ ID NO: 1661 - protein, 8 aa, synthetic construct
  REGION 1..8: note = Synthetic
FQVGSMPP

SEQ ID NO: 1662 - protein, 8 aa, synthetic construct
  REGION 1..8: note = Synthetic
HSRERADE

SEQ ID NO: 1663 - protein, 8 aa, synthetic construct
  REGION 1..8: note = Synthetic
PEQIAADI

SEQ ID NO: 1664 - protein, 8 aa, synthetic construct
  REGION 1..8: note = Synthetic
PEKFKPEH

SEQ ID NO: 1665 - protein, 8 aa, synthetic construct
  REGION 1..8: note = Synthetic
RGPRYAEG

SEQ ID NO: 1666 - protein, 8 aa, synthetic construct
  REGION 1..8: note = Synthetic
GSLRLSCA

SEQ ID NO: 1667 - protein, 8 aa, synthetic construct
  REGION 1..8: note = Synthetic
RSVSGSPG

SEQ ID NO: 1668 - protein, 8 aa, synthetic construct
  REGION 1..8: note = Synthetic
PPPPPGPM

SEQ ID NO: 1669 - protein, 8 aa, synthetic construct
  REGION 1..8: note = Synthetic
PPGPKVSV

SEQ ID NO: 1670 - protein, 8 aa, synthetic construct
  REGION 1..8: note = Synthetic
FSPFRSSR

SEQ ID NO: 1671 - protein, 8 aa, synthetic construct
  REGION 1..8: note = Synthetic
AVETLICS

SEQ ID NO: 1672 - protein, 8 aa, synthetic construct
  REGION 1..8: note = Synthetic
ADKEKELR

SEQ ID NO: 1673 - protein, 8 aa, synthetic construct
  REGION 1..8: note = Synthetic
SSVSVSPG

SEQ ID NO: 1674 - protein, 8 aa, synthetic construct
  REGION 1..8: note = Synthetic
LSFQNPVY

SEQ ID NO: 1675 - protein, 5 aa, synthetic construct
  REGION 1..5: note = Synthetic
HQTTR

SEQ ID NO: 1676 - protein, 8 aa, synthetic construct
  REGION 1..8: note = Synthetic
EPYNATLS

SEQ ID NO: 1677 - protein, 8 aa, synthetic construct
  REGION 1..8: note = Synthetic
WHLSKRDT

SEQ ID NO: 1678 - protein, 8 aa, synthetic construct
  REGION 1..8: note = Synthetic
SLAVSLGE

SEQ ID NO: 1679 - protein, 8 aa, synthetic construct
  REGION 1..8: note = Synthetic
GEVTSPLF

SEQ ID NO: 1680 - protein, 8 aa, synthetic construct
  REGION 1..8: note = Synthetic
SPSPAASA

SEQ ID NO: 1681 - protein, 8 aa, synthetic construct
  REGION 1..8: note = Synthetic
SPPGVDAK

SEQ ID NO: 1682 - protein, 8 aa, synthetic construct
  REGION 1..8: note = Synthetic
TPSPAAPP

SEQ ID NO: 1683 - protein, 8 aa, synthetic construct
  REGION 1..8: note = Synthetic
GGVRGPRV

SEQ ID NO: 1684 - protein, 8 aa, synthetic construct
  REGION 1..8: note = Synthetic
GGVRGPRV

SEQ ID NO: 1685 - protein, 8 aa, synthetic construct
  REGION 1..8: note = Synthetic
RQIRGLEE

SEQ ID NO: 1686 - protein, 8 aa, synthetic construct
  REGION 1..8: note = Synthetic
SLLRSEET

SEQ ID NO: 1687 - protein, 8 aa, synthetic construct
  REGION 1..8: note = Synthetic
RPVRDCDD

SEQ ID NO: 1688 - protein, 10 aa, synthetic construct
  REGION 1..10: note = Synthetic
GGPGPQGPPG

SEQ ID NO: 1689 - protein, 10 aa, synthetic construct
  REGION 1..10: note = Synthetic
CGQPPVVENA

SEQ ID NO: 1690 - protein, 10 aa, synthetic construct
  REGION 1..10: note = Synthetic
GPPGRDGAAG

SEQ ID NO: 1691 - protein, 10 aa, synthetic construct
  REGION 1..10: note = Synthetic
QPLGMISLMK

SEQ ID NO: 1692 - protein, 10 aa, synthetic construct
  REGION 1..10: note = Synthetic
LSSTGRNGFK

SEQ ID NO: 1693 - protein, 10 aa, synthetic construct
  REGION 1..10: note = Synthetic
QPLGMISLMK

SEQ ID NO: 1694 - protein, 10 aa, synthetic construct
  REGION 1..10: note = Synthetic
SRSSKITHRI

SEQ ID NO: 1695 - protein, 10 aa, synthetic construct
  REGION 1..10: note = Synthetic
LQLPSRSSKI

SEQ ID NO: 1696 - protein, 10 aa, synthetic construct
  REGION 1..10: note = Synthetic
TGRNGFKSHA

SEQ ID NO: 1697 - protein, 10 aa, synthetic construct
  REGION 1..10: note = Synthetic
PSRSSKITHR

SEQ ID NO: 1698 - protein, 10 aa, synthetic construct
  REGION 1..10: note = Synthetic
STGRNGFKSH

SEQ ID NO: 1699 - protein, 10 aa, synthetic construct
  REGION 1..10: note = Synthetic
SLQLPSRSSK

SEQ ID NO: 1700 - protein, 10 aa, synthetic construct
  REGION 1..10: note = Synthetic
PCSVFSPVSA

SEQ ID NO: 1701 - protein, 10 aa, synthetic construct
  REGION 1..10: note = Synthetic
DSGKEQGHTR

SEQ ID NO: 1702 - protein, 10 aa, synthetic construct
  REGION 1..10: note = Synthetic
LPSRSSKITH

SEQ ID NO: 1703 - protein, 10 aa, synthetic construct
  REGION 1..10: note = Synthetic
VSLQLPSRSS

SEQ ID NO: 1704 - protein, 10 aa, synthetic construct
  REGION 1..10: note = Synthetic
ALQLNNRQIR

SEQ ID NO: 1705 - protein, 10 aa, synthetic construct
  REGION 1..10: note = Synthetic
LSSTGRNGFK

SEQ ID NO: 1706 - protein, 10 aa, synthetic construct
  REGION 1..10: note = Synthetic
DVSLQLPSRS

SEQ ID NO: 1707 - protein, 10 aa, synthetic construct
  REGION 1..10: note = Synthetic
LNVTLSSTGR

SEQ ID NO: 1708 - protein, 10 aa, synthetic construct
  REGION 1..10: note = Synthetic
HYLPFSLPHR

SEQ ID NO: 1709 - protein, 10 aa, synthetic construct
  REGION 1..10: note = Synthetic
GISLFNNPVP

SEQ ID NO: 1710 - protein, 10 aa, synthetic construct
  REGION 1..10: note = Synthetic
LPGGYGLPYT

SEQ ID NO: 1711 - protein, 10 aa, synthetic construct
  REGION 1..10: note = Synthetic
LGGVAARPGF

SEQ ID NO: 1712 - protein, 10 aa, synthetic construct
  REGION 1..10: note = Synthetic
GIAEFPSRGK

SEQ ID NO: 1713 - protein, 10 aa, synthetic construct
  REGION 1..10: note = Synthetic
GIAEFPSRGK

SEQ ID NO: 1714 - protein, 10 aa, synthetic construct
  REGION 1..10: note = Synthetic
SGIGTLDGFR

SEQ ID NO: 1715 - protein, 10 aa, synthetic construct
  REGION 1..10: note = Synthetic
GIAEFPSRGK

SEQ ID NO: 1716 - protein, 10 aa, synthetic construct
  REGION 1..10: note = Synthetic
VLSVVGTAWT

SEQ ID NO: 1717 - protein, 10 aa, synthetic construct
  REGION 1..10: note = Synthetic
LSVVGTAWTA

SEQ ID NO: 1718 - protein, 10 aa, synthetic construct
  REGION 1..10: note = Synthetic
LSVVGTAWTA

SEQ ID NO: 1719 - protein, 10 aa, synthetic construct
  REGION 1..10: note = Synthetic
SLFEYQKNNK

SEQ ID NO: 1720 - protein, 10 aa, synthetic construct
  REGION 1..10: note = Synthetic
SVVGTAWTAD

SEQ ID NO: 1721 - protein, 10 aa, synthetic construct
  REGION 1..10: note = Synthetic
GIAEFPSRGK

SEQ ID NO: 1722 - protein, 10 aa, synthetic construct
  REGION 1..10: note = Synthetic
VLSVVGTAWT

SEQ ID NO: 1723 - protein, 10 aa, synthetic construct
  REGION 1..10: note = Synthetic
VPDLVPGNFK

SEQ ID NO: 1724 - protein, 10 aa, synthetic construct
  REGION 1..10: note = Synthetic
VVGTAWTADS

SEQ ID NO: 1725 - protein, 10 aa, synthetic construct
  REGION 1..10: note = Synthetic
GSWNSGSSGP

SEQ ID NO: 1726 - protein, 10 aa, synthetic construct
  REGION 1..10: note = Synthetic
VGTAWTADSG

SEQ ID NO: 1727 - protein, 10 aa, synthetic construct
  REGION 1..10: note = Synthetic
GIAEFPSRGK

SEQ ID NO: 1728 - protein, 10 aa, synthetic construct
  REGION 1..10: note = Synthetic
GIAEFPSRGK

SEQ ID NO: 1729 - protein, 10 aa, synthetic construct
  REGION 1..10: note = Synthetic
VLSVVGTAWT

SEQ ID NO: 1730 - protein, 10 aa, synthetic construct
  REGION 1..10: note = Synthetic
PDLVPGNFKS

SEQ ID NO: 1731 - protein, 10 aa, synthetic construct
  REGION 1..10: note = Synthetic
QHLPLIKMKP

SEQ ID NO: 1732 - protein, 10 aa, synthetic construct
  REGION 1..10: note = Synthetic
TAWTADSGEG

SEQ ID NO: 1733 - protein, 10 aa, synthetic construct
  REGION 1..10: note = Synthetic
VLSVVGTAWT

SEQ ID NO: 1734 - protein, 10 aa, synthetic construct
  REGION 1..10: note = Synthetic
AFFDTASTGK

SEQ ID NO: 1735 - protein, 10 aa, synthetic construct
  REGION 1..10: note = Synthetic
RDRQHLPLIK

SEQ ID NO: 1736 - protein, 10 aa, synthetic construct
  REGION 1..10: note = Synthetic
RDRQHLPLIK

SEQ ID NO: 1737 - protein, 10 aa, synthetic construct
  REGION 1..10: note = Synthetic
RNPSSAGSWN

SEQ ID NO: 1738 - protein, 10 aa, synthetic construct
  REGION 1..10: note = Synthetic
RDRQHLPLIK

SEQ ID NO: 1739 - protein, 10 aa, synthetic construct
  REGION 1..10: note = Synthetic
FFSPMLGEFV

SEQ ID NO: 1740 - protein, 10 aa, synthetic construct
  REGION 1..10: note = Synthetic
LSVVGTAWTA

SEQ ID NO: 1741 - protein, 10 aa, synthetic construct
  REGION 1..10: note = Synthetic
SLFEYQKNNK

SEQ ID NO: 1742 - protein, 10 aa, synthetic construct
  REGION 1..10: note = Synthetic
VLSVVGTAWT

SEQ ID NO: 1743 - protein, 10 aa, synthetic construct
  REGION 1..10: note = Synthetic
RDRQHLPLIK

SEQ ID NO: 1744 - protein, 10 aa, synthetic construct
  REGION 1..10: note = Synthetic
SVSGSTGQWH

SEQ ID NO: 1745 - protein, 10 aa, synthetic construct
  REGION 1..10: note = Synthetic
QHLPLIKMKP

SEQ ID NO: 1746 - protein, 10 aa, synthetic construct
  REGION 1..10: note = Synthetic
LTDMPQMRME

SEQ ID NO: 1747 - protein, 10 aa, synthetic construct
  REGION 1..10: note = Synthetic
LPLIKMKPVP

SEQ ID NO: 1748 - protein, 10 aa, synthetic construct
  REGION 1..10: note = Synthetic
RDRQHLPLIK

SEQ ID NO: 1749 - protein, 10 aa, synthetic construct
  REGION 1..10: note = Synthetic
VLSVVGTAWT

SEQ ID NO: 1750 - protein, 10 aa, synthetic construct
  REGION 1..10: note = Synthetic
VPDLVPGNFK

SEQ ID NO: 1751 - protein, 10 aa, synthetic construct
  REGION 1..10: note = Synthetic
IAEFPSRGKS

SEQ ID NO: 1752 - protein, 10 aa, synthetic construct
  REGION 1..10: note = Synthetic
PGFFSPMLGE

SEQ ID NO: 1753 - protein, 10 aa, synthetic construct
  REGION 1..10: note = Synthetic
LTDMPQMRME

SEQ ID NO: 1754 - protein, 10 aa, synthetic construct
  REGION 1..10: note = Synthetic
SRGKSSSYSK

SEQ ID NO: 1755 - protein, 10 aa, synthetic construct
  REGION 1..10: note = Synthetic
AGHWTSESSV

SEQ ID NO: 1756 - protein, 10 aa, synthetic construct
  REGION 1..10: note = Synthetic
SGIGTLDGFR

SEQ ID NO: 1757 - protein, 10 aa, synthetic construct
  REGION 1..10: note = Synthetic
RDRQHLPLIK

SEQ ID NO: 1758 - protein, 10 aa, synthetic construct
  REGION 1..10: note = Synthetic
RPNNPDWGTF

SEQ ID NO: 1759 - protein, 10 aa, synthetic construct
  REGION 1..10: note = Synthetic
LTDMPQMRME

SEQ ID NO: 1760 - protein, 10 aa, synthetic construct
  REGION 1..10: note = Synthetic
RHRHPDEAAF

SEQ ID NO: 1761 - protein, 10 aa, synthetic construct
  REGION 1..10: note = Synthetic
GIAEFPSRGK

SEQ ID NO: 1762 - protein, 10 aa, synthetic construct
  REGION 1..10: note = Synthetic
RDRQHLPLIK

SEQ ID NO: 1763 - protein, 10 aa, synthetic construct
  REGION 1..10: note = Synthetic
PVSLAEDPQG

SEQ ID NO: 1764 - protein, 10 aa, synthetic construct
  REGION 1..10: note = Synthetic
VKFNKPFVFL

SEQ ID NO: 1765 - protein, 10 aa, synthetic construct
  REGION 1..10: note = Synthetic
TEAAGAMFLE

SEQ ID NO: 1766 - protein, 10 aa, synthetic construct
  REGION 1..10: note = Synthetic
AMFLEAIPMS

SEQ ID NO: 1767 - protein, 10 aa, synthetic construct
  REGION 1..10: note = Synthetic
LTIDEKGTEA

SEQ ID NO: 1768 - protein, 10 aa, synthetic construct
  REGION 1..10: note = Synthetic
GAMFLEAIPM

SEQ ID NO: 1769 - protein, 10 aa, synthetic construct
  REGION 1..10: note = Synthetic
EVKFNKPFVF

SEQ ID NO: 1770 - protein, 10 aa, synthetic construct
  REGION 1..10: note = Synthetic
IPMSIPPEVK

SEQ ID NO: 1771 - protein, 10 aa, synthetic construct
  REGION 1..10: note = Synthetic
GTEAAGAMFL

SEQ ID NO: 1772 - protein, 10 aa, synthetic construct
  REGION 1..10: note = Synthetic
LCCLVPVSLA

SEQ ID NO: 1773 - protein, 10 aa, synthetic construct
  REGION 1..10: note = Synthetic
KFNKPFVFLM

SEQ ID NO: 1774 - protein, 10 aa, synthetic construct
  REGION 1..10: note = Synthetic
DEKGTEAAGA

SEQ ID NO: 1775 - protein, 10 aa, synthetic construct
  REGION 1..10: note = Synthetic
AGAMFLEAIP

SEQ ID NO: 1776 - protein, 10 aa, synthetic construct
  REGION 1..10: note = Synthetic
EKGTEAAGAM

SEQ ID NO: 1777 - protein, 10 aa, synthetic construct
  REGION 1..10: note = Synthetic
PVSLAEDPQG

SEQ ID NO: 1778 - protein, 10 aa, synthetic construct
  REGION 1..10: note = Synthetic
KAVLTIDEKG

SEQ ID NO: 1779 - protein, 10 aa, synthetic construct
  REGION 1..10: note = Synthetic
AVLTIDEKGT

SEQ ID NO: 1780 - protein, 10 aa, synthetic construct
  REGION 1..10: note = Synthetic
GTEAAGAMFL

SEQ ID NO: 1781 - protein, 10 aa, synthetic construct
  REGION 1..10: note = Synthetic
LCCLVPVSLA

SEQ ID NO: 1782 - protein, 10 aa, synthetic construct
  REGION 1..10: note = Synthetic
LCCLVPVSLA

SEQ ID NO: 1783 - protein, 10 aa, synthetic construct
  REGION 1..10: note = Synthetic
VLTIDEKGTE

SEQ ID NO: 1784 - protein, 10 aa, synthetic construct
  REGION 1..10: note = Synthetic
PVSLAEDPQG

SEQ ID NO: 1785 - protein, 10 aa, synthetic construct
  REGION 1..10: note = Synthetic
TIDEKGTEAA

SEQ ID NO: 1786 - protein, 10 aa, synthetic construct
  REGION 1..10: note = Synthetic
HKAVLTIDEK

SEQ ID NO: 1787 - protein, 10 aa, synthetic construct
  REGION 1..10: note = Synthetic
IDEKGTEAAG

SEQ ID NO: 1788 - protein, 10 aa, synthetic construct
  REGION 1..10: note = Synthetic
LCCLVPVSLA

SEQ ID NO: 1789 - protein, 10 aa, synthetic construct
  REGION 1..10: note = Synthetic
CLVPVSLAED

SEQ ID NO: 1790 - protein, 10 aa, synthetic construct
  REGION 1..10: note = Synthetic
ASSFFTLSLQ

SEQ ID NO: 1791 - protein, 10 aa, synthetic construct
  REGION 1..10: note = Synthetic
ASSFFTLSLQ

SEQ ID NO: 1792 - protein, 10 aa, synthetic construct
  REGION 1..10: note = Synthetic
ASSFFTLSLQ

SEQ ID NO: 1793 - protein, 10 aa, synthetic construct
  REGION 1..10: note = Synthetic
ASSFFTLSLQ

SEQ ID NO: 1794 - protein, 10 aa, synthetic construct
  REGION 1..10: note = Synthetic
ASSFFTLSLQ

SEQ ID NO: 1795 - protein, 10 aa, synthetic construct
  REGION 1..10: note = Synthetic
ASSFFTLSLQ

SEQ ID NO: 1796 - protein, 10 aa, synthetic construct
  REGION 1..10: note = Synthetic
ASSFFTLSLQ

SEQ ID NO: 1797 - protein, 10 aa, synthetic construct
  REGION 1..10: note = Synthetic
ASSFFTLSLQ

SEQ ID NO: 1798 - protein, 10 aa, synthetic construct
  REGION 1..10: note = Synthetic
LNVTLSSTGR

SEQ ID NO: 1799 - protein, 10 aa, synthetic construct
  REGION 1..10: note = Synthetic
ASSFFTLSLQ

SEQ ID NO: 1800 - protein, 10 aa, synthetic construct
  REGION 1..10: note = Synthetic
LNVTLSSTGR

SEQ ID NO: 1801 - protein, 10 aa, synthetic construct
  REGION 1..10: note = Synthetic
DYEYDELPAK

SEQ ID NO: 1802 - protein, 10 aa, synthetic construct
  REGION 1..10: note = Synthetic
ASSFFTLSLQ

SEQ ID NO: 1803 - protein, 10 aa, synthetic construct
  REGION 1..10: note = Synthetic
ALQLNNRQIR

SEQ ID NO: 1804 - protein, 10 aa, synthetic construct
  REGION 1..10: note = Synthetic
YEYDELPAKD

SEQ ID NO: 1805 - protein, 10 aa, synthetic construct
  REGION 1..10: note = Synthetic
DYEYDELPAK

SEQ ID NO: 1806 - protein, 10 aa, synthetic construct
  REGION 1..10: note = Synthetic
NVTLSSTGRN

SEQ ID NO: 1807 - protein, 10 aa, synthetic construct
  REGION 1..10: note = Synthetic
DYEYDELPAK

SEQ ID NO: 1808 - protein, 10 aa, synthetic construct
  REGION 1..10: note = Synthetic
ASSFFTLSLQ

SEQ ID NO: 1809 - protein, 10 aa, synthetic construct
  REGION 1..10: note = Synthetic
DYEYDELPAK

SEQ ID NO: 1810 - protein, 10 aa, synthetic construct
  REGION 1..10: note = Synthetic
ALQLNNRQIR

SEQ ID NO: 1811 - protein, 10 aa, synthetic construct
  REGION 1..10: note = Synthetic
ELNPLDHRGR

SEQ ID NO: 1812 - protein, 10 aa, synthetic construct
  REGION 1..10: note = Synthetic
TLSLQKPRLL

SEQ ID NO: 1813 - protein, 10 aa, synthetic construct
  REGION 1..10: note = Synthetic
IIPQTISELQ

SEQ ID NO: 1814 - protein, 10 aa, synthetic construct
  REGION 1..10: note = Synthetic
SPHPAIARLT

SEQ ID NO: 1815 - protein, 10 aa, synthetic construct
  REGION 1..10: note = Synthetic
TLSLQKPRLL

SEQ ID NO: 1816 - protein, 10 aa, synthetic construct
  REGION 1..10: note = Synthetic
EYDELPAKDD

SEQ ID NO: 1817 - protein, 10 aa, synthetic construct
  REGION 1..10: note = Synthetic
YEYDELPAKD

SEQ ID NO: 1818 - protein, 10 aa, synthetic construct
  REGION 1..10: note = Synthetic
LSLQKPRLLL

SEQ ID NO: 1819 - protein, 10 aa, synthetic construct
  REGION 1..10: note = Synthetic
ANEDYEDYEY

SEQ ID NO: 1820 - protein, 10 aa, synthetic construct
  REGION 1..10: note = Synthetic
TLSLQKPRLL

SEQ ID NO: 1821 - protein, 10 aa, synthetic construct
  REGION 1..10: note = Synthetic
TLSLQKPRLL

SEQ ID NO: 1822 - protein, 10 aa, synthetic construct
  REGION 1..10: note = Synthetic
HPAIARLTVA

SEQ ID NO: 1823 - protein, 10 aa, synthetic construct
  REGION 1..10: note = Synthetic
RGHRPLDKKR

SEQ ID NO: 1824 - protein, 10 aa, synthetic construct
  REGION 1..10: note = Synthetic
GHRPLDKKRE

SEQ ID NO: 1825 - protein, 10 aa, synthetic construct
  REGION 1..10: note = Synthetic
ARGHRPLDKK

SEQ ID NO: 1826 - protein, 10 aa, synthetic construct
  REGION 1..10: note = Synthetic
LLLCVFLVKS

SEQ ID NO: 1827 - protein, 10 aa, synthetic construct
  REGION 1..10: note = Synthetic
LLLCVFLVKS

SEQ ID NO: 1828 - protein, 10 aa, synthetic construct
  REGION 1..10: note = Synthetic
LLLCVFLVKS

SEQ ID NO: 1829 - protein, 10 aa, synthetic construct
  REGION 1..10: note = Synthetic
LLLCVFLVKS

SEQ ID NO: 1830 - protein, 10 aa, synthetic construct
  REGION 1..10: note = Synthetic
LLLCVFLVKS

SEQ ID NO: 1831 - protein, 10 aa, synthetic construct
  REGION 1..10: note = Synthetic
SARGHRPLDK

SEQ ID NO: 1832 - protein, 10 aa, synthetic construct
  REGION 1..10: note = Synthetic
LLLCVFLVKS

SEQ ID NO: 1833 - protein, 10 aa, synthetic construct
  REGION 1..10: note = Synthetic
LLLCVFLVKS

SEQ ID NO: 1834 - protein, 10 aa, synthetic construct
  REGION 1..10: note = Synthetic
FFSARGHRPL

SEQ ID NO: 1835 - protein, 10 aa, synthetic construct
  REGION 1..10: note = Synthetic
LLLCVFLVKS

SEQ ID NO: 1836 - protein, 10 aa, synthetic construct
  REGION 1..10: note = Synthetic
CVFLVKSQGV

SEQ ID NO: 1837 - protein, 10 aa, synthetic construct
  REGION 1..10: note = Synthetic
LLLCVFLVKS

SEQ ID NO: 1838 - protein, 10 aa, synthetic construct
  REGION 1..10: note = Synthetic
LLLCVFLVKS

SEQ ID NO: 1839 - protein, 10 aa, synthetic construct
  REGION 1..10: note = Synthetic
LCVFLVKSQG

SEQ ID NO: 1840 - protein, 10 aa, synthetic construct
  REGION 1..10: note = Synthetic
LCVFLVKSQG

SEQ ID NO: 1841 - protein, 10 aa, synthetic construct
  REGION 1..10: note = Synthetic
LCVFLVKSQG

SEQ ID NO: 1842 - protein, 10 aa, synthetic construct
  REGION 1..10: note = Synthetic
LLLCVFLVKS

SEQ ID NO: 1843 - protein, 10 aa, synthetic construct
  REGION 1..10: note = Synthetic
LLLCVFLVKS

SEQ ID NO: 1844 - protein, 10 aa, synthetic construct
  REGION 1..10: note = Synthetic
LLLCVFLVKS

SEQ ID NO: 1845 - protein, 10 aa, synthetic construct
  REGION 1..10: note = Synthetic
LCVFLVKSQG

SEQ ID NO: 1846 - protein, 10 aa, synthetic construct
  REGION 1..10: note = Synthetic
SARGHRPLDK

SEQ ID NO: 1847 - protein, 10 aa, synthetic construct
  REGION 1..10: note = Synthetic
DNEEGFFSAR

SEQ ID NO: 1848 - protein, 10 aa, synthetic construct
  REGION 1..10: note = Synthetic
CVFLVKSQGV

SEQ ID NO: 1849 - protein, 10 aa, synthetic construct
  REGION 1..10: note = Synthetic
LLLCVFLVKS

SEQ ID NO: 1850 - protein, 10 aa, synthetic construct
  REGION 1..10: note = Synthetic
LLLCVFLVKS

SEQ ID NO: 1851 - protein, 10 aa, synthetic construct
  REGION 1..10: note = Synthetic
WYSMRKMSMK

SEQ ID NO: 1852 - protein, 10 aa, synthetic construct
  REGION 1..10: note = Synthetic
VFLVKSQGVN

SEQ ID NO: 1853 - protein, 10 aa, synthetic construct
  REGION 1..10: note = Synthetic
LLLCVFLVKS

SEQ ID NO: 1854 - protein, 10 aa, synthetic construct
  REGION 1..10: note = Synthetic
LLLCVFLVKS

SEQ ID NO: 1855 - protein, 10 aa, synthetic construct
  REGION 1..10: note = Synthetic
LLLCVFLVKS

SEQ ID NO: 1856 - protein, 10 aa, synthetic construct
  REGION 1..10: note = Synthetic
ISDARENIQR

SEQ ID NO: 1857 - protein, 10 aa, synthetic construct
  REGION 1..10: note = Synthetic
GPGGVWAAEA

SEQ ID NO: 1858 - protein, 10 aa, synthetic construct
  REGION 1..10: note = Synthetic
QRFFGHGAED

SEQ ID NO: 1859 - protein, 10 aa, synthetic construct
  REGION 1..10: note = Synthetic
SDARENIQRF

SEQ ID NO: 1860 - protein, 10 aa, synthetic construct
  REGION 1..10: note = Synthetic
FCSLVLGVSS

SEQ ID NO: 1861 - protein, 10 aa, synthetic construct
  REGION 1..10: note = Synthetic
ANEWGRSGKD

SEQ ID NO: 1862 - protein, 10 aa, synthetic construct
  REGION 1..10: note = Synthetic
AKRGPGGVWA

SEQ ID NO: 1863 - protein, 10 aa, synthetic construct
  REGION 1..10: note = Synthetic
GAEDSLADQA

SEQ ID NO: 1864 - protein, 10 aa, synthetic construct
  REGION 1..10: note = Synthetic
SFFSFLGEAF

SEQ ID NO: 1865 - protein, 10 aa, synthetic construct
  REGION 1..10: note = Synthetic
GVWAAEAISD

SEQ ID NO: 1866 - protein, 10 aa, synthetic construct
  REGION 1..10: note = Synthetic
CSLVLSVSSR

SEQ ID NO: 1867 - protein, 10 aa, synthetic construct
  REGION 1..10: note = Synthetic
FGHGAEDSLA

SEQ ID NO: 1868 - protein, 10 aa, synthetic construct
  REGION 1..10: note = Synthetic
LSVSSRSFFS

SEQ ID NO: 1869 - protein, 10 aa, synthetic construct
  REGION 1..10: note = Synthetic
GHGAEDSLAD

SEQ ID NO: 1870 - protein, 10 aa, synthetic construct
  REGION 1..10: note = Synthetic
AISDARENIQ

SEQ ID NO: 1871 - protein, 10 aa, synthetic construct
  REGION 1..10: note = Synthetic
ISDARENIQR

SEQ ID NO: 1872 - protein, 10 aa, synthetic construct
  REGION 1..10: note = Synthetic
RENIQRFFGH

SEQ ID NO: 1873 - protein, 10 aa, synthetic construct
  REGION 1..10: note = Synthetic
AANEWGRSGK

SEQ ID NO: 1874 - protein, 10 aa, synthetic construct
  REGION 1..10: note = Synthetic
ARENIQRFFG

SEQ ID NO: 1875 - protein, 10 aa, synthetic construct
  REGION 1..10: note = Synthetic
ADQAANEWGR

SEQ ID NO: 1876 - protein, 10 aa, synthetic construct
  REGION 1..10: note = Synthetic
AEDSLADQAA

SEQ ID NO: 1877 - protein, 10 aa, synthetic construct
  REGION 1..10: note = Synthetic
GGVWAAEAIS

SEQ ID NO: 1878 - protein, 10 aa, synthetic construct
  REGION 1..10: note = Synthetic
VLSVSSRSFF

SEQ ID NO: 1879 - protein, 10 aa, synthetic construct
  REGION 1..10: note = Synthetic
FGHGAEDSLA

SEQ ID NO: 1880 - protein, 10 aa, synthetic construct
  REGION 1..10: note = Synthetic
GVWAAEAISD

SEQ ID NO: 1881 - protein, 10 aa, synthetic construct
  REGION 1..10: note = Synthetic
FFGHGAEDSL

SEQ ID NO: 1882 - protein, 10 aa, synthetic construct
  REGION 1..10: note = Synthetic
PGGVWAAEAI

SEQ ID NO: 1883 - protein, 10 aa, synthetic construct
  REGION 1..10: note = Synthetic
VSSRSFFSFL

SEQ ID NO: 1884 - protein, 10 aa, synthetic construct
  REGION 1..10: note = Synthetic
IGSDKYFHAR

SEQ ID NO: 1885 - protein, 10 aa, synthetic construct
  REGION 1..10: note = Synthetic
FCSLVLGVSS

SEQ ID NO: 1886 - protein, 10 aa, synthetic construct
  REGION 1..10: note = Synthetic
GNYDAAKRGP

SEQ ID NO: 1887 - protein, 10 aa, synthetic construct
  REGION 1..10: note = Synthetic
EHAEVVFTAN

SEQ ID NO: 1888 - protein, 10 aa, synthetic construct
  REGION 1..10: note = Synthetic
AEVVFTANDS

SEQ ID NO: 1889 - protein, 10 aa, synthetic construct
  REGION 1..10: note = Synthetic
AEVVFTANDS

SEQ ID NO: 1890 - protein, 10 aa, synthetic construct
  REGION 1..10: note = Synthetic
HAEVVFTAND

SEQ ID NO: 1891 - protein, 10 aa, synthetic construct
  REGION 1..10: note = Synthetic
EVVFTANDSG

SEQ ID NO: 1892 - protein, 10 aa, synthetic construct
  REGION 1..10: note = Synthetic
PRRYTIAALL

SEQ ID NO: 1893 - protein, 10 aa, synthetic construct
  REGION 1..10: note = Synthetic
DSGPRRYTIA

SEQ ID NO: 1894 - protein, 10 aa, synthetic construct
  REGION 1..10: note = Synthetic
ANDSGPRRYT

SEQ ID NO: 1895 - protein, 10 aa, synthetic construct
  REGION 1..10: note = Synthetic
PFHEHAEVVF

SEQ ID NO: 1896 - protein, 10 aa, synthetic construct
  REGION 1..10: note = Synthetic
DTKSYWKALG

SEQ ID NO: 1897 - protein, 10 aa, synthetic construct
  REGION 1..10: note = Synthetic
PCSVFSPVSA

SEQ ID NO: 1898 - protein, 10 aa, synthetic construct
  REGION 1..10: note = Synthetic
PCSVFSPVSA

SEQ ID NO: 1899 - protein, 10 aa, synthetic construct
  REGION 1..10: note = Synthetic
PLGRQLTSGP

SEQ ID NO: 1900 - protein, 10 aa, synthetic construct
  REGION 1..10: note = Synthetic
GDKLFGPDLK

SEQ ID NO: 1901 - protein, 10 aa, synthetic construct
  REGION 1..10: note = Synthetic
AMEPLGRQLT

SEQ ID NO: 1902 - protein, 10 aa, synthetic construct
  REGION 1..10: note = Synthetic
PCSVFSPVSA

SEQ ID NO: 1903 - protein, 10 aa, synthetic construct
  REGION 1..10: note = Synthetic
CSVFSPVSAM

SEQ ID NO: 1904 - protein, 10 aa, synthetic construct
  REGION 1..10: note = Synthetic
PLGRQLTSGP

SEQ ID NO: 1905 - protein, 10 aa, synthetic construct
  REGION 1..10: note = Synthetic
PLGRQLTSGP

SEQ ID NO: 1906 - protein, 10 aa, synthetic construct
  REGION 1..10: note = Synthetic
AAATSIAMSR

SEQ ID NO: 1907 - protein, 10 aa, synthetic construct
  REGION 1..10: note = Synthetic
PCSVFSPVSA

SEQ ID NO: 1908 - protein, 10 aa, synthetic construct
  REGION 1..10: note = Synthetic
EDLRQGLLPV

SEQ ID NO: 1909 - protein, 10 aa, synthetic construct
  REGION 1..10: note = Synthetic
DLRQGLLPVL

SEQ ID NO: 1910 - protein, 10 aa, synthetic construct
  REGION 1..10: note = Synthetic
PQSPWDRVKD

SEQ ID NO: 1911 - protein, 10 aa, synthetic construct
  REGION 1..10: note = Synthetic
GSQARHFWQQ

SEQ ID NO: 1912 - protein, 10 aa, synthetic construct
  REGION 1..10: note = Synthetic
LRQGLLPVLE

SEQ ID NO: 1913 - protein, 10 aa, synthetic construct
  REGION 1..10: note = Synthetic
GLLPVLESFK

SEQ ID NO: 1914 - protein, 10 aa, synthetic construct
  REGION 1..10: note = Synthetic
LGPVTQEFWD

SEQ ID NO: 1915 - protein, 10 aa, synthetic construct
  REGION 1..10: note = Synthetic
VLESFKVSFL

SEQ ID NO: 1916 - protein, 10 aa, synthetic construct
  REGION 1..10: note = Synthetic
LLPVLESFKV

SEQ ID NO: 1917 - protein, 10 aa, synthetic construct
  REGION 1..10: note = Synthetic
GSQARHFWQQ

SEQ ID NO: 1918 - protein, 10 aa, synthetic construct
  REGION 1..10: note = Synthetic
LYRQKVEPLR

SEQ ID NO: 1919 - protein, 10 aa, synthetic construct
  REGION 1..10: note = Synthetic
LYRQKVEPLR

SEQ ID NO: 1920 - protein, 10 aa, synthetic construct
  REGION 1..10: note = Synthetic
GSQARHFWQQ

SEQ ID NO: 1921 - protein, 10 aa, synthetic construct
  REGION 1..10: note = Synthetic
TAVKITLLSA

SEQ ID NO: 1922 - protein, 10 aa, synthetic construct
  REGION 1..10: note = Synthetic
AATAVKITLL

SEQ ID NO: 1923 - protein, 10 aa, synthetic construct
  REGION 1..10: note = Synthetic
AVKITLLSAL

SEQ ID NO: 1924 - protein, 10 aa, synthetic construct
  REGION 1..10: note = Synthetic
KITLLSALVE

SEQ ID NO: 1925 - protein, 10 aa, synthetic construct
  REGION 1..10: note = Synthetic
PFLMIIVPTD

SEQ ID NO: 1926 - protein, 10 aa, synthetic construct
  REGION 1..10: note = Synthetic
ATAVKITLLS

SEQ ID NO: 1927 - protein, 10 aa, synthetic construct
  REGION 1..10: note = Synthetic
GFCPAVLCHP

SEQ ID NO: 1928 - protein, 10 aa, synthetic construct
  REGION 1..10: note = Synthetic
IVRFNRPFLM

SEQ ID NO: 1929 - protein, 10 aa, synthetic construct
  REGION 1..10: note = Synthetic
AAGFCPAVLC

SEQ ID NO: 1930 - protein, 10 aa, synthetic construct
  REGION 1..10: note = Synthetic
FVMLVQGSWQ

SEQ ID NO: 1931 - protein, 10 aa, synthetic construct
  REGION 1..10: note = Synthetic
FVMLVQGSWQ

SEQ ID NO: 1932 - protein, 10 aa, synthetic construct
  REGION 1..10: note = Synthetic
MLVQGSWQRS

SEQ ID NO: 1933 - protein, 10 aa, synthetic construct
  REGION 1..10: note = Synthetic
VMLVQGSWQR

SEQ ID NO: 1934 - protein, 10 aa, synthetic construct
  REGION 1..10: note = Synthetic
DPDQMNEDKR

SEQ ID NO: 1935 - protein, 10 aa, synthetic construct
  REGION 1..10: note = Synthetic
MLVQGSWQRS

SEQ ID NO: 1936 - protein, 10 aa, synthetic construct
  REGION 1..10: note = Synthetic
DPDQMNEDKR

SEQ ID NO: 1937 - protein, 10 aa, synthetic construct
  REGION 1..10: note = Synthetic
LVQGSWQRSL

SEQ ID NO: 1938 - protein, 10 aa, synthetic construct
  REGION 1..10: note = Synthetic
VMLVQGSWQR

SEQ ID NO: 1939 - protein, 10 aa, synthetic construct
  REGION 1..10: note = Synthetic
AWLVKGRGRR

SEQ ID NO: 1940 - protein, 10 aa, synthetic construct
  REGION 1..10: note = Synthetic
KRNRNNIAKR

SEQ ID NO: 1941 - protein, 10 aa, synthetic construct
  REGION 1..10: note = Synthetic
LLLLASLTSG

SEQ ID NO: 1942 - protein, 10 aa, synthetic construct
  REGION 1..10: note = Synthetic
LLLLASLTSG

SEQ ID NO: 1943 - protein, 10 aa, synthetic construct
  REGION 1..10: note = Synthetic
LLLLASLTSG

SEQ ID NO: 1944 - protein, 10 aa, synthetic construct
  REGION 1..10: note = Synthetic
LLLLASLTSG

SEQ ID NO: 1945 - protein, 10 aa, synthetic construct
  REGION 1..10: note = Synthetic
LLLLASLTSG

SEQ ID NO: 1946 - protein, 10 aa, synthetic construct
  REGION 1..10: note = Synthetic
LLLLASLTSG

SEQ ID NO: 1947 - protein, 10 aa, synthetic construct
  REGION 1..10: note = Synthetic
ASLTSGSVFP

SEQ ID NO: 1948 - protein, 10 aa, synthetic construct
  REGION 1..10: note = Synthetic
LLLASLTSGS

SEQ ID NO: 1949 - protein, 10 aa, synthetic construct
  REGION 1..10: note = Synthetic
ASLTSGSVFP

SEQ ID NO: 1950 - protein, 10 aa, synthetic construct
  REGION 1..10: note = Synthetic
LLLLASLTSG

SEQ ID NO: 1951 - protein, 10 aa, synthetic construct
  REGION 1..10: note = Synthetic
LLLLASLTSG

SEQ ID NO: 1952 - protein, 10 aa, synthetic construct
  REGION 1..10: note = Synthetic
LLLLASLTSG

SEQ ID NO: 1953 - protein, 10 aa, synthetic construct
  REGION 1..10: note = Synthetic
GPNARENIQR

SEQ ID NO: 1954 - protein, 10 aa, synthetic construct
  REGION 1..10: note = Synthetic
PNARENIQRL

SEQ ID NO: 1955 - protein, 10 aa, synthetic construct
  REGION 1..10: note = Synthetic
AANKWGRSGR

SEQ ID NO: 1956 - protein, 10 aa, synthetic construct
  REGION 1..10: note = Synthetic
NARENIQRLT

SEQ ID NO: 1957 - protein, 10 aa, synthetic construct
  REGION 1..10: note = Synthetic
PNARENIQRL

SEQ ID NO: 1958 - protein, 10 aa, synthetic construct
  REGION 1..10: note = Synthetic
GPNARENIQR

SEQ ID NO: 1959 - protein, 10 aa, synthetic construct
  REGION 1..10: note = Synthetic
QRLTGRGAED

SEQ ID NO: 1960 - protein, 10 aa, synthetic construct
  REGION 1..10: note = Synthetic
ARENIQRLTG

SEQ ID NO: 1961 - protein, 10 aa, synthetic construct
  REGION 1..10: note = Synthetic
ENIQRLTGRG

SEQ ID NO: 1962 - protein, 10 aa, synthetic construct
  REGION 1..10: note = Synthetic
ARGNYDAAKR

SEQ ID NO: 1963 - protein, 10 aa, synthetic construct
  REGION 1..10: note = Synthetic
AKRGPGGAWA

SEQ ID NO: 1964 - protein, 10 aa, synthetic construct
  REGION 1..10: note = Synthetic
TGRGAEDSLA

SEQ ID NO: 1965 - protein, 10 aa, synthetic construct
  REGION 1..10: note = Synthetic
KRGPGGAWAA

SEQ ID NO: 1966 - protein, 10 aa, synthetic construct
  REGION 1..10: note = Synthetic
DKSKLKKTET

SEQ ID NO: 1967 - protein, 10 aa, synthetic construct
  REGION 1..10: note = Synthetic
FDKSKLKKTE

SEQ ID NO: 1968 - protein, 10 aa, synthetic construct
  REGION 1..10: note = Synthetic
SKLKKTETQE

SEQ ID NO: 1969 - protein, 10 aa, synthetic construct
  REGION 1..10: note = Synthetic
EKFDKSKLKK

SEQ ID NO: 1970 - protein, 10 aa, synthetic construct
  REGION 1..10: note = Synthetic
KSKLKKTETQ

SEQ ID NO: 1971 - protein, 10 aa, synthetic construct
  REGION 1..10: note = Synthetic
KLKKTETQEK

SEQ ID NO: 1972 - protein, 10 aa, synthetic construct
  REGION 1..10: note = Synthetic
PKNPANPVQR

SEQ ID NO: 1973 - protein, 10 aa, synthetic construct
  REGION 1..10: note = Synthetic
PKNPANPVQR

SEQ ID NO: 1974 - protein, 10 aa, synthetic construct
  REGION 1..10: note = Synthetic
CAVAEYGVYV

SEQ ID NO: 1975 - protein, 10 aa, synthetic construct
  REGION 1..10: note = Synthetic
PKNPANPVQR

SEQ ID NO: 1976 - protein, 10 aa, synthetic construct
  REGION 1..10: note = Synthetic
PKNPANPVQR

SEQ ID NO: 1977 - protein, 5 aa, synthetic construct
  REGION 1..5: note = Synthetic
MSALG

SEQ ID NO: 1978 - protein, 4 aa, synthetic construct
  REGION 1..4: note = Synthetic
MSAL

SEQ ID NO: 1979 - protein, 10 aa, synthetic construct
  REGION 1..10: note = Synthetic
NFKLLSHCLL

SEQ ID NO: 1980 - protein, 10 aa, synthetic construct
  REGION 1..10: note = Synthetic
KLLSHCLLVT

SEQ ID NO: 1981 - protein, 10 aa, synthetic construct
  REGION 1..10: note = Synthetic
FTPAVHASLD

SEQ ID NO: 1982 - protein, 10 aa, synthetic construct
  REGION 1..10: note = Synthetic
LLSHCLLVTL

SEQ ID NO: 1983 - protein, 10 aa, synthetic construct
  REGION 1..10: note = Synthetic
VALEQAQKVR

SEQ ID NO: 1984 - protein, 10 aa, synthetic construct
  REGION 1..10: note = Synthetic
AQKVRYEGSY

SEQ ID NO: 1985 - protein, 10 aa, synthetic construct
  REGION 1..10: note = Synthetic
EQAQKVRYEG

SEQ ID NO: 1986 - protein, 10 aa, synthetic construct
  REGION 1..10: note = Synthetic
PDAPPSPPLG

SEQ ID NO: 1987 - protein, 10 aa, synthetic construct
  REGION 1..10: note = Synthetic
GEVSHPRKTR

SEQ ID NO: 1988 - protein, 10 aa, synthetic construct
  REGION 1..10: note = Synthetic
PDAPPSPPLG

SEQ ID NO: 1989 - protein, 10 aa, synthetic construct
  REGION 1..10: note = Synthetic
GSPPDSHVLL

SEQ ID NO: 1990 - protein, 10 aa, synthetic construct
  REGION 1..10: note = Synthetic
PDAPPSPPLG

SEQ ID NO: 1991 - protein, 10 aa, synthetic construct
  REGION 1..10: note = Synthetic
SPPDSHVLLA

SEQ ID NO: 1992 - protein, 10 aa, synthetic construct
  REGION 1..10: note = Synthetic
PDAPPSPPLG

SEQ ID NO: 1993 - protein, 10 aa, synthetic construct
  REGION 1..10: note = Synthetic
GSPPDSHVLL

SEQ ID NO: 1994 - protein, 10 aa, synthetic construct
  REGION 1..10: note = Synthetic
AKERAHQQKK

SEQ ID NO: 1995 - protein, 10 aa, synthetic construct
  REGION 1..10: note = Synthetic
AKERAHQQKK

SEQ ID NO: 1996 - protein, 10 aa, synthetic construct
  REGION 1..10: note = Synthetic
LEAGLPLQVR

SEQ ID NO: 1997 - protein, 10 aa, synthetic construct
  REGION 1..10: note = Synthetic
AKERAHQQKK

SEQ ID NO: 1998 - protein, 10 aa, synthetic construct
  REGION 1..10: note = Synthetic
LAKELTAEKR

SEQ ID NO: 1999 - protein, 10 aa, synthetic construct
  REGION 1..10: note = Synthetic
LAKELTAEKR

SEQ ID NO: 2000 - protein, 10 aa, synthetic construct
  REGION 1..10: note = Synthetic
LDVSLQLPSR

SEQ ID NO: 2001 - protein, 10 aa, synthetic construct
  REGION 1..10: note = Synthetic
LDVSLQLPSR

SEQ ID NO: 2002 - protein, 10 aa, synthetic construct
  REGION 1..10: note = Synthetic
LQLPSRSSKI

SEQ ID NO: 2003 - protein, 10 aa, synthetic construct
  REGION 1..10: note = Synthetic
VSLQLPSRSS

SEQ ID NO: 2004 - protein, 10 aa, synthetic construct
  REGION 1..10: note = Synthetic
LLTHLPLALG

SEQ ID NO: 2005 - protein, 10 aa, synthetic construct
  REGION 1..10: note = Synthetic
LPSRSSKITH

SEQ ID NO: 2006 - protein, 10 aa, synthetic construct
  REGION 1..10: note = Synthetic
QLPSRSSKIT

SEQ ID NO: 2007 - protein, 10 aa, synthetic construct
  REGION 1..10: note = Synthetic
SRSSKITHRI

SEQ ID NO: 2008 - protein, 10 aa, synthetic construct
  REGION 1..10: note = Synthetic
PSRSSKITHR

SEQ ID NO: 2009 - protein, 10 aa, synthetic construct
  REGION 1..10: note = Synthetic
DIFELLFWGR

SEQ ID NO: 2010 - protein, 10 aa, synthetic construct
  REGION 1..10: note = Synthetic
LLFWGRTSAG

SEQ ID NO: 2011 - protein, 10 aa, synthetic construct
  REGION 1..10: note = Synthetic
QVGGPSLTSD

SEQ ID NO: 2012 - protein, 10 aa, synthetic construct
  REGION 1..10: note = Synthetic
DSWEDIFELL

SEQ ID NO: 2013 - protein, 10 aa, synthetic construct
  REGION 1..10: note = Synthetic
LLFWGRTSAG

SEQ ID NO: 2014 - protein, 10 aa, synthetic construct
  REGION 1..10: note = Synthetic
DIFELLFWGR

SEQ ID NO: 2015 - protein, 10 aa, synthetic construct
  REGION 1..10: note = Synthetic
DSWEDIFELL

SEQ ID NO: 2016 - protein, 10 aa, synthetic construct
  REGION 1..10: note = Synthetic
VDAAFRQGHN

SEQ ID NO: 2017 - protein, 10 aa, synthetic construct
  REGION 1..10: note = Synthetic
VDAAFRQGHN

SEQ ID NO: 2018 - protein, 10 aa, synthetic construct
  REGION 1..10: note = Synthetic
VDAAFRQGHN

SEQ ID NO: 2019 - protein, 10 aa, synthetic construct
  REGION 1..10: note = Synthetic
RELISERWKN

SEQ ID NO: 2020 - protein, 10 aa, synthetic construct
  REGION 1..10: note = Synthetic
VDAAFRQGHN

SEQ ID NO: 2021 - protein, 10 aa, synthetic construct
  REGION 1..10: note = Synthetic
VFLIKGDKVW

SEQ ID NO: 2022 - protein, 10 aa, synthetic construct
  REGION 1..10: note = Synthetic
PAPAQSQTQF

SEQ ID NO: 2023 - protein, 10 aa, synthetic construct
  REGION 1..10: note = Synthetic
HVQSQTQPVS

SEQ ID NO: 2024 - protein, 10 aa, synthetic construct
  REGION 1..10: note = Synthetic
PAPAQSQTQF

SEQ ID NO: 2025 - protein, 10 aa, synthetic construct
  REGION 1..10: note = Synthetic
PAPAQSQTQF

SEQ ID NO: 2026 - protein, 10 aa, synthetic construct
  REGION 1..10: note = Synthetic
FGPVVAPKPK

SEQ ID NO: 2027 - protein, 10 aa, synthetic construct
  REGION 1..10: note = Synthetic
LLALLASARA

SEQ ID NO: 2028 - protein, 10 aa, synthetic construct
  REGION 1..10: note = Synthetic
LLALLASARA

SEQ ID NO: 2029 - protein, 10 aa, synthetic construct
  REGION 1..10: note = Synthetic
STVKDKFSEF

SEQ ID NO: 2030 - protein, 10 aa, synthetic construct
  REGION 1..10: note = Synthetic
LLALLASARA

SEQ ID NO: 2031 - protein, 10 aa, synthetic construct
  REGION 1..10: note = Synthetic
DKFSEFWDLD

SEQ ID NO: 2032 - protein, 10 aa, synthetic construct
  REGION 1..10: note = Synthetic
KLAPVSKRFP

SEQ ID NO: 2033 - protein, 10 aa, synthetic construct
  REGION 1..10: note = Synthetic
TDKLAPVSKR

SEQ ID NO: 2034 - protein, 10 aa, synthetic construct
  REGION 1..10: note = Synthetic
KLAPVSKRFP

SEQ ID NO: 2035 - protein, 10 aa, synthetic construct
  REGION 1..10: note = Synthetic
INSNQVKRVP

SEQ ID NO: 2036 - protein, 10 aa, synthetic construct
  REGION 1..10: note = Synthetic
EIINSNQVKR

SEQ ID NO: 2037 - protein, 10 aa, synthetic construct
  REGION 1..10: note = Synthetic
LSKSGYPKTP

SEQ ID NO: 2038 - protein, 10 aa, synthetic construct
  REGION 1..10: note = Synthetic
ETQQWPERKL

SEQ ID NO: 2039 - protein, 10 aa, synthetic construct
  REGION 1..10: note = Synthetic
EPTESTQQLN

SEQ ID NO: 2040 - protein, 10 aa, synthetic construct
  REGION 1..10: note = Synthetic
LEADEREPTE

SEQ ID NO: 2041 - protein, 10 aa, synthetic construct
  REGION 1..10: note = Synthetic
ADEREPTEST

SEQ ID NO: 2042 - protein, 10 aa, synthetic construct
  REGION 1..10: note = Synthetic
VLTSLSHAFG

SEQ ID NO: 2043 - protein, 10 aa, synthetic construct
  REGION 1..10: note = Synthetic
VLTSLSHAFG

SEQ ID NO: 2044 - protein, 10 aa, synthetic construct
  REGION 1..10: note = Synthetic
VLTSLSHAFG

SEQ ID NO: 2045 - protein, 10 aa, synthetic construct
  REGION 1..10: note = Synthetic
SAYSRGVFRR

SEQ ID NO: 2046 - protein, 10 aa, synthetic construct
  REGION 1..10: note = Synthetic
SAYSRGVFRR

SEQ ID NO: 2047 - protein, 10 aa, synthetic construct
  REGION 1..10: note = Synthetic
SAYSRGVFRR

SEQ ID NO: 2048 - protein, 10 aa, synthetic construct
  REGION 1..10: note = Synthetic
EGKNVIGLQM

SEQ ID NO: 2049 - protein, 10 aa, synthetic construct
  REGION 1..10: note = Synthetic
QEGKNVIGLQ

SEQ ID NO: 2050 - protein, 10 aa, synthetic construct
  REGION 1..10: note = Synthetic
TNRGASQAGM

SEQ ID NO: 2051 - protein, 10 aa, synthetic construct
  REGION 1..10: note = Synthetic
MLTRPRYGKR

SEQ ID NO: 2052 - protein, 10 aa, synthetic construct
  REGION 1..10: note = Synthetic
QPLLGAQGAP

SEQ ID NO: 2053 - protein, 10 aa, synthetic construct
  REGION 1..10: note = Synthetic
VALLLQPLLG

SEQ ID NO: 2054 - protein, 10 aa, synthetic construct
  REGION 1..10: note = Synthetic
QPLLGAQGAP

SEQ ID NO: 2055 - protein, 10 aa, synthetic construct
  REGION 1..10: note = Synthetic
LINGLGAAPP

SEQ ID NO: 2056 - protein, 10 aa, synthetic construct
  REGION 1..10: note = Synthetic
LINGLGAAPP

SEQ ID NO: 2057 - protein, 10 aa, synthetic construct
  REGION 1..10: note = Synthetic
CLLLINGLGA

SEQ ID NO: 2058 - protein, 10 aa, synthetic construct
  REGION 1..10: note = Synthetic
VEEKRKRKKN

SEQ ID NO: 2059 - protein, 10 aa, synthetic construct
  REGION 1..10: note = Synthetic
EVEEKRKRKK

SEQ ID NO: 2060 - protein, 10 aa, synthetic construct
  REGION 1..10: note = Synthetic
CLLLINGLGA

SEQ ID NO: 2061 - protein, 10 aa, synthetic construct
  REGION 1..10: note = Synthetic
GSQQGPEEEA

SEQ ID NO: 2062 - protein, 10 aa, synthetic construct
  REGION 1..10: note = Synthetic
EVEEKRKRKK

SEQ ID NO: 2063 - protein, 10 aa, synthetic construct
  REGION 1..10: note = Synthetic
RTPGIWLLHC

SEQ ID NO: 2064 - protein, 10 aa, synthetic construct
  REGION 1..10: note = Synthetic
LFLCSTPAWA

SEQ ID NO: 2065 - protein, 10 aa, synthetic construct
  REGION 1..10: note = Synthetic
HNRSAMPFTA

SEQ ID NO: 2066 - protein, 10 aa, synthetic construct
  REGION 1..10: note = Synthetic
KQSTSFLVLQ

SEQ ID NO: 2067 - protein, 10 aa, synthetic construct
  REGION 1..10: note = Synthetic
TTARVITNQY

SEQ ID NO: 2068 - protein, 10 aa, synthetic construct
  REGION 1..10: note = Synthetic
PYPRIHFPLA

SEQ ID NO: 2069 - protein, 10 aa, synthetic construct
  REGION 1..10: note = Synthetic
PYPRIHFPLA

SEQ ID NO: 2070 - protein, 10 aa, synthetic construct
  REGION 1..10: note = Synthetic
PLATYAPVIS

SEQ ID NO: 2071 - protein, 10 aa, synthetic construct
  REGION 1..10: note = Synthetic
EVGGEALGRL

SEQ ID NO: 2072 - protein, 10 aa, synthetic construct
  REGION 1..10: note = Synthetic
SNEQATSLNT

SEQ ID NO: 2073 - protein, 10 aa, synthetic construct
  REGION 1..10: note = Synthetic
NEQATSLNTV

SEQ ID NO: 2074 - protein, 10 aa, synthetic construct
  REGION 1..10: note = Synthetic
SNEQATSLNT

SEQ ID NO: 2075 - protein, 10 aa, synthetic construct
  REGION 1..10: note = Synthetic
KSNEQATSLN

SEQ ID NO: 2076 - protein, 10 aa, synthetic construct
  REGION 1..10: note = Synthetic
ICFFLSEVSG

SEQ ID NO: 2077 - protein, 10 aa, synthetic construct
  REGION 1..10: note = Synthetic
TAAAKRRITR

SEQ ID NO: 2078 - protein, 10 aa, synthetic construct
  REGION 1..10: note = Synthetic
DQYYLRVTTV

SEQ ID NO: 2079 - protein, 10 aa, synthetic construct
  REGION 1..10: note = Synthetic
PVEVSRKNPK

SEQ ID NO: 2080 - protein, 10 aa, synthetic construct
  REGION 1..10: note = Synthetic
VLEGPAPAQG

SEQ ID NO: 2081 - protein, 10 aa, synthetic construct
  REGION 1..10: note = Synthetic
EGPAPAQGTP

SEQ ID NO: 2082 - protein, 10 aa, synthetic construct
  REGION 1..10: note = Synthetic
KTSEVKQLIK

SEQ ID NO: 2083 - protein, 10 aa, synthetic construct
  REGION 1..10: note = Synthetic
NWIQYKEGFG

SEQ ID NO: 2084 - protein, 10 aa, synthetic construct
  REGION 1..10: note = Synthetic
MKIIPFNRLT

SEQ ID NO: 2085 - protein, 10 aa, synthetic construct
  REGION 1..10: note = Synthetic
ARSVSKRSRR

SEQ ID NO: 2086 - protein, 10 aa, synthetic construct
  REGION 1..10: note = Synthetic
RSVSKRSRRE

SEQ ID NO: 2087 - protein, 10 aa, synthetic construct
  REGION 1..10: note = Synthetic
LLSHCTGSVT

SEQ ID NO: 2088 - protein, 10 aa, synthetic construct
  REGION 1..10: note = Synthetic
LSHCTGSVTS

SEQ ID NO: 2089 - protein, 10 aa, synthetic construct
  REGION 1..10: note = Synthetic
SETVCLCNHF

SEQ ID NO: 2090 - protein, 10 aa, synthetic construct
  REGION 1..10: note = Synthetic
SETVCLCNHF

SEQ ID NO: 2091 - protein, 10 aa, synthetic construct
  REGION 1..10: note = Synthetic
LTLCTGSEAS

SEQ ID NO: 2092 - protein, 10 aa, synthetic construct
  REGION 1..10: note = Synthetic
VLAYCTGSVA

SEQ ID NO: 2093 - protein, 10 aa, synthetic construct
  REGION 1..10: note = Synthetic
LIHCTGSWAQ

SEQ ID NO: 2094 - protein, 10 aa, synthetic construct
  REGION 1..10: note = Synthetic
CTGSWAQSVL

SEQ ID NO: 2095 - protein, 10 aa, synthetic construct
  REGION 1..10: note = Synthetic
LITHCAGSWA

SEQ ID NO: 2096 - protein, 11 aa, synthetic construct
  REGION 1..11: note = Synthetic
LITHCAGSWAQ

SEQ ID NO: 2097 - protein, 10 aa, synthetic construct
  REGION 1..10: note = Synthetic
CTGSVASYEL

SEQ ID NO: 2098 - protein, 10 aa, synthetic construct
  REGION 1..10: note = Synthetic
LLGLLCGSVA

SEQ ID NO: 2099 - protein, 10 aa, synthetic construct
  REGION 1..10: note = Synthetic
LLLWLPDTTG

SEQ ID NO: 2100 - protein, 10 aa, synthetic construct
  REGION 1..10: note = Synthetic
LLWLPDTTGE

SEQ ID NO: 2101 - protein, 10 aa, synthetic construct
  REGION 1..10: note = Synthetic
LMLWVPGSSG

SEQ ID NO: 2102 - protein, 10 aa, synthetic construct
  REGION 1..10: note = Synthetic
LMLWVPGSSG

SEQ ID NO: 2103 - protein, 10 aa, synthetic construct
  REGION 1..10: note = Synthetic
DNFPRYPVGK

SEQ ID NO: 2104 - protein, 10 aa, synthetic construct
  REGION 1..10: note = Synthetic
DNFPRYPVGK

SEQ ID NO: 2105 - protein, 10 aa, synthetic construct
  REGION 1..10: note = Synthetic
KAGTELVNFL

SEQ ID NO: 2106 - protein, 10 aa, synthetic construct
  REGION 1..10: note = Synthetic
EQLTPLIKKA

SEQ ID NO: 2107 - protein, 10 aa, synthetic construct
  REGION 1..10: note = Synthetic
SLVSQYFQTV

SEQ ID NO: 2108 - protein, 10 aa, synthetic construct
  REGION 1..10: note = Synthetic
LMLWVPGSSG

SEQ ID NO: 2109 - protein, 10 aa, synthetic construct
  REGION 1..10: note = Synthetic
LMLWVPGSSG

SEQ ID NO: 2110 - protein, 10 aa, synthetic construct
  REGION 1..10: note = Synthetic
DRAIEGRTAT

SEQ ID NO: 2111 - protein, 10 aa, synthetic construct
  REGION 1..10: note = Synthetic
RAIEGRTATS

SEQ ID NO: 2112 - protein, 10 aa, synthetic construct
  REGION 1..10: note = Synthetic
LAALCSLVHS

SEQ ID NO: 2113 - protein, 10 aa, synthetic construct
  REGION 1..10: note = Synthetic
LLGYLLSAEC

SEQ ID NO: 2114 - protein, 10 aa, synthetic construct
  REGION 1..10: note = Synthetic
GYLLSAECTV

SEQ ID NO: 2115 - protein, 10 aa, synthetic construct
  REGION 1..10: note = Synthetic
ALFLGVGVRA

SEQ ID NO: 2116 - protein, 10 aa, synthetic construct
  REGION 1..10: note = Synthetic
ALFLGVGVRA

SEQ ID NO: 2117 - protein, 10 aa, synthetic construct
  REGION 1..10: note = Synthetic
YRGCVLRSKR

SEQ ID NO: 2118 - protein, 10 aa, synthetic construct
  REGION 1..10: note = Synthetic
VVILVHGELR

SEQ ID NO: 2119 - protein, 10 aa, synthetic construct
  REGION 1..10: note = Synthetic
IFVVVILVHG

SEQ ID NO: 2120 - protein, 10 aa, synthetic construct
  REGION 1..10: note = Synthetic
NPMEHANHMA

SEQ ID NO: 2121 - protein, 10 aa, synthetic construct
  REGION 1..10: note = Synthetic
TANPMEHANH

SEQ ID NO: 2122 - protein, 10 aa, synthetic construct
  REGION 1..10: note = Synthetic
ISDFYPGAVT

SEQ ID NO: 2123 - protein, 10 aa, synthetic construct
  REGION 1..10: note = Synthetic
ISDFYPGAVT

SEQ ID NO: 2124 - protein, 10 aa, synthetic construct
  REGION 1..10: note = Synthetic
AWKADSSPVK

SEQ ID NO: 2125 - protein, 10 aa, synthetic construct
  REGION 1..10: note = Synthetic
FLIFLGKTWG

SEQ ID NO: 2126 - protein, 10 aa, synthetic construct
  REGION 1..10: note = Synthetic
VENCLANKVD

SEQ ID NO: 2127 - protein, 10 aa, synthetic construct
  REGION 1..10: note = Synthetic
LLLVLLPTDA

SEQ ID NO: 2128 - protein, 10 aa, synthetic construct
  REGION 1..10: note = Synthetic
LMLWVSGSSG

SEQ ID NO: 2129 - protein, 10 aa, synthetic construct
  REGION 1..10: note = Synthetic
LMLWVSGSSG

SEQ ID NO: 2130 - protein, 10 aa, synthetic construct
  REGION 1..10: note = Synthetic
AQGCHRRMRR

SEQ ID NO: 2131 - protein, 10 aa, synthetic construct
  REGION 1..10: note = Synthetic
YQLVDESDAF

SEQ ID NO: 2132 - protein, 10 aa, synthetic construct
  REGION 1..10: note = Synthetic
SWGSGCGDRN

SEQ ID NO: 2133 - protein, 10 aa, synthetic construct
  REGION 1..10: note = Synthetic
GFFYTPKTRR

SEQ ID NO: 2134 - protein, 10 aa, synthetic construct
  REGION 1..10: note = Synthetic
VSESCPGKFK

SEQ ID NO: 2135 - protein, 10 aa, synthetic construct
  REGION 1..10: note = Synthetic
LLLWLPDTTG

SEQ ID NO: 2136 - protein, 10 aa, synthetic construct
  REGION 1..10: note = Synthetic
LLLWLRGARC

SEQ ID NO: 2137 - protein, 10 aa, synthetic construct
  REGION 1..10: note = Synthetic
PPGPPSAGFD

SEQ ID NO: 2138 - protein, 10 aa, synthetic construct
  REGION 1..10: note = Synthetic
CLGLSLCVGS

SEQ ID NO: 2139 - protein, 10 aa, synthetic construct
  REGION 1..10: note = Synthetic
LALFVGAGHA

SEQ ID NO: 2140 - protein, 10 aa, synthetic construct
  REGION 1..10: note = Synthetic
LALFVGAGHA

SEQ ID NO: 2141 - protein, 10 aa, synthetic construct
  REGION 1..10: note = Synthetic
HPAHHKRDRR

SEQ ID NO: 2142 - protein, 10 aa, synthetic construct
  REGION 1..10: note = Synthetic
LGLCIFLLYK

SEQ ID NO: 2143 - protein, 10 aa, synthetic construct
  REGION 1..10: note = Synthetic
LLAHCTGSWA

SEQ ID NO: 2144 - protein, 10 aa, synthetic construct
  REGION 1..10: note = Synthetic
LAHCTGSWAN

SEQ ID NO: 2145 - protein, 10 aa, synthetic construct
  REGION 1..10: note = Synthetic
LLLWLPDTTG

SEQ ID NO: 2146 - protein, 10 aa, synthetic construct
  REGION 1..10: note = Synthetic
GVLQACPTRG

SEQ ID NO: 2147 - protein, 10 aa, synthetic construct
  REGION 1..10: note = Synthetic
PPPPGPFARR

SEQ ID NO: 2148 - protein, 10 aa, synthetic construct
  REGION 1..10: note = Synthetic
PHPTARPWRA

SEQ ID NO: 2149 - protein, 10 aa, synthetic construct
  REGION 1..10: note = Synthetic
LLTQGTGSWA

SEQ ID NO: 2150 - protein, 10 aa, synthetic construct
  REGION 1..10: note = Synthetic
GTGSWAQSAL

SEQ ID NO: 2151 - protein, 10 aa, synthetic construct
  REGION 1..10: note = Synthetic
SCHVQHSSLA

SEQ ID NO: 2152 - protein, 10 aa, synthetic construct
  REGION 1..10: note = Synthetic
VSPKKSTVLQ

SEQ ID NO: 2153 - protein, 10 aa, synthetic construct
  REGION 1..10: note = Synthetic
KFEVRLLRDP

SEQ ID NO: 2154 - protein, 10 aa, synthetic construct
  REGION 1..10: note = Synthetic
ILLVALQAQA

SEQ ID NO: 2155 - protein, 10 aa, synthetic construct
  REGION 1..10: note = Synthetic
PTLDSVLYDN

SEQ ID NO: 2156 - protein, 10 aa, synthetic construct
  REGION 1..10: note = Synthetic
LSLFLAVGLG

SEQ ID NO: 2157 - protein, 10 aa, synthetic construct
  REGION 1..10: note = Synthetic
LAAILKGVQC

SEQ ID NO: 2158 - protein, 10 aa, synthetic construct
  REGION 1..10: note = Synthetic
LTQGTGSWAQ

SEQ ID NO: 2159 - protein, 10 aa, synthetic construct
  REGION 1..10: note = Synthetic
YDADCEDIDC

SEQ ID NO: 2160 - protein, 10 aa, synthetic construct
  REGION 1..10: note = Synthetic
EKGERGEQGR

SEQ ID NO: 2161 - protein, 10 aa, synthetic construct
  REGION 1..10: note = Synthetic
QPLGMISLMK

SEQ ID NO: 2162 - protein, 10 aa, synthetic construct
  REGION 1..10: note = Synthetic
EASNCFAIRH

SEQ ID NO: 2163 - protein, 10 aa, synthetic construct
  REGION 1..10: note = Synthetic
TPSPGLQPAH

SEQ ID NO: 2164 - protein, 10 aa, synthetic construct
  REGION 1..10: note = Synthetic
GEEPARRHRA

SEQ ID NO: 2165 - protein, 10 aa, synthetic construct
  REGION 1..10: note = Synthetic
LILCTVSVAS

SEQ ID NO: 2166 - protein, 10 aa, synthetic construct
  REGION 1..10: note = Synthetic
HPALNQPGGL

SEQ ID NO: 2167 - protein, 10 aa, synthetic construct
  REGION 1..10: note = Synthetic
KEPVTTRQVR

SEQ ID NO: 2168 - protein, 10 aa, synthetic construct
  REGION 1..10: note = Synthetic
EYPDRIMNTF

SEQ ID NO: 2169 - protein, 10 aa, synthetic construct
  REGION 1..10: note = Synthetic
RPPKLHPGLR

SEQ ID NO: 2170 - protein, 10 aa, synthetic construct
  REGION 1..10: note = Synthetic
LLLWISGAYG

SEQ ID NO: 2171 - protein, 10 aa, synthetic construct
  REGION 1..10: note = Synthetic
VPALFCRAGG

SEQ ID NO: 2172 - protein, 10 aa, synthetic construct
  REGION 1..10: note = Synthetic
KEKKSAKKPS

SEQ ID NO: 2173 - protein, 10 aa, synthetic construct
  REGION 1..10: note = Synthetic
ISKPPGVALP

SEQ ID NO: 2174 - protein, 10 aa, synthetic construct
  REGION 1..10: note = Synthetic
STGPSANKPC

SEQ ID NO: 2175 - protein, 10 aa, synthetic construct
  REGION 1..10: note = Synthetic
VQCSDLGLDK

SEQ ID NO: 2176 - protein, 10 aa, synthetic construct
  REGION 1..10: note = Synthetic
RLEAGDHPVE

SEQ ID NO: 2177 - protein, 10 aa, synthetic construct
  REGION 1..10: note = Synthetic
PQPGVPLGYP

SEQ ID NO: 2178 - protein, 10 aa, synthetic construct
  REGION 1..10: note = Synthetic
GGPGFGPGVV

SEQ ID NO: 2179 - protein, 10 aa, synthetic construct
  REGION 1..10: note = Synthetic
GSPGKDGVRG

SEQ ID NO: 2180 - protein, 10 aa, synthetic construct
  REGION 1..10: note = Synthetic
EPGPAGSDGL

SEQ ID NO: 2181 - protein, 10 aa, synthetic construct
  REGION 1..10: note = Synthetic
LNRKYEQAKN

SEQ ID NO: 2182 - protein, 10 aa, synthetic construct
  REGION 1..10: note = Synthetic
RLRSSVPGVR

SEQ ID NO: 2183 - protein, 10 aa, synthetic construct
  REGION 1..10: note = Synthetic
TGPPGPQGLQ

SEQ ID NO: 2184 - protein, 10 aa, synthetic construct
  REGION 1..10: note = Synthetic
LPGMKGDPGE

SEQ ID NO: 2185 - protein, 10 aa, synthetic construct
  REGION 1..10: note = Synthetic
LPGSPGPPGP

SEQ ID NO: 2186 - protein, 10 aa, synthetic construct
  REGION 1..10: note = Synthetic
GPPGPPGRLV

SEQ ID NO: 2187 - protein, 10 aa, synthetic construct
  REGION 1..10: note = Synthetic
VGTAWTADSG

SEQ ID NO: 2188 - protein, 10 aa, synthetic construct
  REGION 1..10: note = Synthetic
LSVVGTAWTA

SEQ ID NO: 2189 - protein, 10 aa, synthetic construct
  REGION 1..10: note = Synthetic
VPGVGISPEA

SEQ ID NO: 2190 - protein, 10 aa, synthetic construct
  REGION 1..10: note = Synthetic
HAFGQTDMSR

SEQ ID NO: 2191 - protein, 10 aa, synthetic construct
  REGION 1..10: note = Synthetic
GVAPGIGPGG

SEQ ID NO: 2192 - protein, 10 aa, synthetic construct
  REGION 1..10: note = Synthetic
APRGVKGAKG

SEQ ID NO: 2193 - protein, 10 aa, synthetic construct
  REGION 1..10: note = Synthetic
GPPGKRGPSG

SEQ ID NO: 2194 - protein, 10 aa, synthetic construct
  REGION 1..10: note = Synthetic
LNVTLSSTGR

SEQ ID NO: 2195 - protein, 10 aa, synthetic construct
  REGION 1..10: note = Synthetic
LDVSLQLPSR

SEQ ID NO: 2196 - protein, 10 aa, synthetic construct
  REGION 1..10: note = Synthetic
NRGDSTFESK

SEQ ID NO: 2197 - protein, 11 aa, synthetic construct
  REGION 1..11: note = Synthetic
VEKTRCQHERE

SEQ ID NO: 2198 - protein, 10 aa, synthetic construct
  REGION 1..10: note = Synthetic
GPKGGIGNRG

SEQ ID NO: 2199 - protein, 8 aa, synthetic construct
  REGION 1..8: note = Synthetic
RPPGFSPF

SEQ ID NO: 2200 - protein, 9 aa, synthetic construct
  REGION 1..9: note = Synthetic
SHALQLNNR

SEQ ID NO: 2201 - protein, 9 aa, synthetic construct
  REGION 1..9: note = Synthetic
RPPGFSPFR

SEQ ID NO: 2202 - protein, 9 aa, synthetic construct
  REGION 1..9: note = Synthetic
HWESASLLR

SEQ ID NO: 2203 - protein, 9 aa, synthetic construct
  REGION 1..9: note = Synthetic
THRIHWESA

SEQ ID NO: 2204 - protein, 9 aa, synthetic construct
  REGION 1..9: note = Synthetic
LQLNNRQIR

SEQ ID NO: 2205 - protein, 10 aa, synthetic construct
  REGION 1..10: note = Synthetic
IHWESASLLR

SEQ ID NO: 2206 - protein, 10 aa, synthetic construct
  REGION 1..10: note = Synthetic
ALQLNNRQIR

SEQ ID NO: 2207 - protein, 10 aa, synthetic construct
  REGION 1..10: note = Synthetic
ITHRIHWESA

SEQ ID NO: 2208 - protein, 12 aa, synthetic construct
  REGION 1..12: note = Synthetic
MEPLGRQLTSGP

SEQ ID NO: 2209 - protein, 10 aa, synthetic construct
  REGION 1..10: note = Synthetic
RHDWGHEKQR

SEQ ID NO: 2210 - protein, 11 aa, synthetic construct
  REGION 1..11: note = Synthetic
RIHWESASLLR

SEQ ID NO: 2211 - protein, 11 aa, synthetic construct
  REGION 1..11: note = Synthetic
KITHRIHWESA

SEQ ID NO: 2212 - protein, 13 aa, synthetic construct
  REGION 1..13: note = Synthetic
GLEEELQFSLGSK

SEQ ID NO: 2213 - protein, 12 aa, synthetic construct
  REGION 1..12: note = Synthetic
SHALQLNNRQIR

SEQ ID NO: 2214 - protein, 12 aa, synthetic construct
  REGION 1..12: note = Synthetic
SKITHRIHWESA

SEQ ID NO: 2215 - protein, 13 aa, synthetic construct
  REGION 1..13: note = Synthetic
NGFKSHALQLNNR

SEQ ID NO: 2216 - protein, 12 aa, synthetic construct
  REGION 1..12: note = Synthetic
RPHFFFPKSRIV

SEQ ID NO: 2217 - protein, 25 aa, synthetic construct
  REGION 1..25: note = Synthetic
SSSYSKQFTSSTSYNRGDSTFESKS

SEQ ID NO: 2218 - protein, 26 aa, synthetic construct
  REGION 1..26: note = Synthetic
SSSYSKQFTSSTSYNRGDSTFESKSY

SEQ ID NO: 2219 - protein, 64 aa, synthetic construct
  REGION 1..64: note = Synthetic
HRHPDEAAFFDTASTGKTFPGFFSPMLGEFVSETESRGSESGIFTNTKESSSHHPGIAEFPSRG

SEQ ID NO: 2220 - protein, 28 aa, synthetic construct
  REGION 1..28: note = Synthetic
SSSYSKQFTSSTSYNRGDSTFESKSYKM

SEQ ID NO: 2221 - protein, 16 aa, synthetic construct
  REGION 1..16: note = Synthetic
ADSGEGDFLAEGGGVR

SEQ ID NO: 2222 - protein, 15 aa, synthetic construct
  REGION 1..15: note = Synthetic
DSGEGDFLAEGGGVR

SEQ ID NO: 2223 - protein, 14 aa, synthetic construct
  REGION 1..14: note = Synthetic
DSGEGDFLAEGGGV

SEQ ID NO: 2224 - protein, 23 aa, synthetic construct
  REGION 1..23: note = Synthetic
DSHSLTTNIMEILRGDFSSANNR

SEQ ID NO: 2225 - protein, 14 aa, synthetic construct
  REGION 1..14: note = Synthetic
SGEGDFLAEGGGVR

SEQ ID NO: 2226 - protein, 29 aa, synthetic construct
  REGION 1..29: note = Synthetic
SSSYSKQFTSSTSYNRGDSTFESKSYKMA

SEQ ID NO: 2227 - protein, 15 aa, synthetic construct
  REGION 1..15: note = Synthetic
ADSGEGDFLAEGGGV

SEQ ID NO: 2228 - protein, 22 aa, synthetic construct
  REGION 1..22: note = Synthetic
SQLQKVPPEWKALTDMPQMRME

SEQ ID NO: 2229 - protein, 13 aa, synthetic construct
  REGION 1..13: note = Synthetic
GEGDFLAEGGGVR

SEQ ID NO: 2230 - protein, 26 aa, synthetic construct
  REGION 1..26: note = Synthetic
GSTGNRNPGSSGTGGTATWKPGSSGP

SEQ ID NO: 2231 - protein, 12 aa, synthetic construct
  REGION 1..12: note = Synthetic
EGDFLAEGGGVR

SEQ ID NO: 2232 - protein, 29 aa, synthetic construct
  REGION 1..29: note = Synthetic
SSSYSKQFTSSTSYNRGDSTFESKSYKMA

SEQ ID NO: 2233 - protein, 23 aa, synthetic construct
  REGION 1..23: note = Synthetic
SSSYSKQFTSSTSYNRGDSTFES

SEQ ID NO: 2234 - protein, 21 aa, synthetic construct
  REGION 1..21: note = Synthetic
ADSGEGDFLAEGGGVRGPRVV

SEQ ID NO: 2235 - protein, 10 aa, synthetic construct
  REGION 1..10: note = Synthetic
QLQKVPPEWK

SEQ ID NO: 2236 - protein, 10 aa, synthetic construct
  REGION 1..10: note = Synthetic
VPDLVPGNFK

SEQ ID NO: 2237 - protein, 10 aa, synthetic construct
  REGION 1..10: note = Synthetic
DFLAEGGGVR

SEQ ID NO: 2238 - protein, 20 aa, synthetic construct
  REGION 1..20: note = Synthetic
ADSGEGDFLAEGGGVRGPRV

SEQ ID NO: 2239 - protein, 47 aa, synthetic construct
  REGION 1..47: note = Synthetic
TFPGFFSPMLGEFVSETESRGSESGIFTNTKESSSHHPGIAEFPSRG

SEQ ID NO: 2240 - protein, 13 aa, synthetic construct
  REGION 1..13: note = Synthetic
MKPVPDLVPGNFK

SEQ ID NO: 2241 - protein, 17 aa, synthetic construct
  REGION 1..17: note = Synthetic
MKPVPDLVPGNFKSQLQ

SEQ ID NO: 2242 - protein, 32 aa, synthetic construct
  REGION 1..32: note = Synthetic
SGSSGPGSTGNRNPGSSGTGGTATWKPGSSGP

SEQ ID NO: 2243 - protein, 35 aa, synthetic construct
  REGION 1..35: note = Synthetic
MKPVPDLVPGNFKSQLQKVPPEWKALTDMPQMRME

SEQ ID NO: 2244 - protein, 33 aa, synthetic construct
  REGION 1..33: note = Synthetic
SETESRGSESGIFTNTKESSSHHPGIAEFPSRG

SEQ ID NO: 2245 - protein, 20 aa, synthetic construct
  REGION 1..20: note = Synthetic
DSGEGDFLAEGGGVRGPRVV

SEQ ID NO: 2246 - protein, 22 aa, synthetic construct
  REGION 1..22: note = Synthetic
DSHSLTTNIMEILRGDFSSANN

SEQ ID NO: 2247 - protein, 22 aa, synthetic construct
  REGION 1..22: note = Synthetic
ADSGEGDFLAEGGGVRGPRVVE

SEQ ID NO: 2248 - protein, 27 aa, synthetic construct
  REGION 1..27: note = Synthetic
MKPVPDLVPGNFKSQLQKVPPEWKALT

SEQ ID NO: 2249 - protein, 26 aa, synthetic construct
  REGION 1..26: note = Synthetic
SESGSFRPDSPGSGNARPNNPDWGTF

SEQ ID NO: 2250 - protein, 9 aa, synthetic construct
  REGION 1..9: note = Synthetic
VPDLVPGNF

SEQ ID NO: 2251 - protein, 28 aa, synthetic construct
  REGION 1..28: note = Synthetic
LERPGGNEITRGGSTSYGTGSETESPRN

SEQ ID NO: 2252 - protein, 7 aa, synthetic construct
  REGION 1..7: note = Synthetic
DLVPGNF

SEQ ID NO: 2253 - protein, 33 aa, synthetic construct
  REGION 1..33: note = Synthetic
MKPVPDLVPGNFKSQLQKVPPEWKALTDMPQMR

SEQ ID NO: 2254 - protein, 25 aa, synthetic construct
  REGION 1..25: note = Synthetic
ADSGEGDFLAEGGGVRGPRVVERHQ

SEQ ID NO: 2255 - protein, 14 aa, synthetic construct
  REGION 1..14: note = Synthetic
SQLQKVPPEWKALT

SEQ ID NO: 2256 - protein, 22 aa, synthetic construct
  REGION 1..22: note = Synthetic
SSYSKQFTSSTSYNRGDSTFES

SEQ ID NO: 2257 - protein, 35 aa, synthetic construct
  REGION 1..35: note = Synthetic
FVSETESRGSESGIFTNTKESSSHHPGIAEFPSRG

SEQ ID NO: 2258 - protein, 49 aa, synthetic construct
  REGION 1..49: note = Synthetic
LERPGGNEITRGGSTSYGTGSETESPRNPSSAGSWNSGSSGPGSTGNRN

SEQ ID NO: 2259 - protein, 20 aa, synthetic construct
  REGION 1..20: note = Synthetic
QFTSSTSYNRGDSTFESKSY

SEQ ID NO: 2260 - protein, 34 aa, synthetic construct
  REGION 1..34: note = Synthetic
SGSTGQWHSESGSFRPDSPGSGNARPNNPDWGTF

SEQ ID NO: 2261 - protein, 64 aa, synthetic construct; identical to SEQ ID NO: 2219
  REGION 1..64: note = Synthetic

SEQ ID NO: 2262 - protein, 37 aa, synthetic construct
  REGION 1..37: note = Synthetic
MKPVPDLVPGNFKSQLQKVPPEWKALTDMPQMRMELE

SEQ ID NO: 2263 - protein, 23 aa, synthetic construct
  REGION 1..23: note = Synthetic
EEVSGNVSPGTRREYHTEKLVTS

SEQ ID NO: 2264 - protein, 36 aa, synthetic construct
  REGION 1..36: note = Synthetic
LERPGGNEITRGGSTSYGTGSETESPRNPSSAGSWN

SEQ ID NO: 2265 - protein, 12 aa, synthetic construct
  REGION 1..12: note = Synthetic
FDTASTGKTFPG

SEQ ID NO: 2266 - protein, 49 aa, synthetic construct
  REGION 1..49: note = Synthetic
SSSYSKQFTSSTSYNRGDSTFESKSYKMADEAGSEADHEGTHSTKRGHA

SEQ ID NO: 2267 - protein, 12 aa, synthetic construct
  REGION 1..12: note = Synthetic
MKPVPDLVPGNF

SEQ ID NO: 2268 - protein, 39 aa, synthetic construct
  REGION 1..39: note = Synthetic
DAAQKTDTSHHDQDHPTFNKITPNLAEFAFSLYRQLAHQ

SEQ ID NO: 2269 - protein, 44 aa, synthetic construct
  REGION 1..44: note = Synthetic
EDPQGDAAQKTDTSHHDQDHPTFNKITPNLAEFAFSLYRQLAHQ

SEQ ID NO: 2270 - protein, 40 aa, synthetic construct
  REGION 1..40: note = Synthetic
DAAQKTDTSHHDQDHPTFNKITPNLAEFAFSLYRQLAHQS

SEQ ID NO: 2271 - protein, 45 aa, synthetic construct
  REGION 1..45: note = Synthetic
EDPQGDAAQKTDTSHHDQDHPTFNKITPNLAEFAFSLYRQLAHQS

SEQ ID NO: 2272 - protein, 43 aa, synthetic construct
  REGION 1..43: note = Synthetic
EDPQGDAAQKTDTSHHDQDHPTFNKITPNLAEFAFSLYRQLAH

SEQ ID NO: 2273 - protein, 38 aa, synthetic construct
  REGION 1..38: note = Synthetic
DAAQKTDTSHHDQDHPTFNKITPNLAEFAFSLYRQLAH

SEQ ID NO: 2274 - protein, 42 aa, synthetic construct
  REGION 1..42: note = Synthetic
EDPQGDAAQKTDTSHHDQDHPTFNKITPNLAEFAFSLYRQLA

SEQ ID NO: 2275 - protein, 42 aa, synthetic construct
  REGION 1..42: note = Synthetic
PQGDAAQKTDTSHHDQDHPTFNKITPNLAEFAFSLYRQLAHQ

SEQ ID NO: 2276 - protein, 34 aa, synthetic construct
  REGION 1..34: note = Synthetic
KPRLLLFSPSVVHLGVPLSVGVQLQDVPRGQVVK

SEQ ID NO: 2277 - protein, 30 aa, synthetic construct
  REGION 1..30: note = Synthetic
KPRLLLFSPSVVHLGVPLSVGVQLQDVPRG

SEQ ID NO: 2278 - protein, 45 aa, synthetic construct
  REGION 1..45: note = Synthetic
KPRLLLFSPSVVHLGVPLSVGVQLQDVPRGQVVKGSVFLRNPSRN

SEQ ID NO: 2279 - protein, 46 aa, synthetic construct
  REGION 1..46: note = Synthetic
KPRLLLFSPSVVHLGVPLSVGVQLQDVPRGQVVKGSVFLRNPSRNN

SEQ ID NO: 2280 - protein, 19 aa, synthetic construct
  REGION 1..19: note = Synthetic
KPRLLLFSPSVVHLGVPLS

SEQ ID NO: 2281 - protein, 38 aa, synthetic construct
  REGION 1..38: note = Synthetic
KPRLLLFSPSVVHLGVPLSVGVQLQDVPRGQVVKGSVF

SEQ ID NO: 2282 - protein, 25 aa, synthetic construct
  REGION 1..25: note = Synthetic
KPRLLLFSPSVVHLGVPLSVGVQLQ

SEQ ID NO: 2283 - protein, 23 aa, synthetic construct
  REGION 1..23: note = Synthetic
KPRLLLFSPSVVHLGVPLSVGVQ

SEQ ID NO: 2284 - protein, 15 aa, synthetic construct
  REGION 1..15: note = Synthetic
NGFKSHALQLNNRQI

SEQ ID NO: 2285 - protein, 15 aa, synthetic construct
  REGION 1..15: note = Synthetic
KPRLLLFSPSVVHLG

SEQ ID NO: 2286 - protein, 16 aa, synthetic construct
  REGION 1..16: note = Synthetic
NGFKSHALQLNNRQIR

SEQ ID NO: 2287 - protein, 21 aa, synthetic construct
  REGION 1..21: note = Synthetic
DDPDAPLQPVTPLQLFEGRRN

SEQ ID NO: 2288 - protein, 13 aa, synthetic construct
  REGION 1..13: note = Synthetic
KPRLLLFSPSVVH

SEQ ID NO: 2289 - protein, 17 aa, synthetic construct
  REGION 1..17: note = Synthetic
GLEEELQFSLGSKINVK

SEQ ID NO: 2290 - protein, 11 aa, synthetic construct
  REGION 1..11: note = Synthetic
DPDAPLQPVTP

SEQ ID NO: 2291 - protein, 12 aa, synthetic construct
  REGION 1..12: note = Synthetic
DDPDAPLQPVTP

SEQ ID NO: 2292 - protein, 14 aa, synthetic construct
  REGION 1..14: note = Synthetic
GFKSHALQLNNRQI

SEQ ID NO: 2293 - protein, 14 aa, synthetic construct
  REGION 1..14: note = Synthetic
DDPDAPLQPVTPLQ

SEQ ID NO: 2294 - protein, 40 aa, synthetic construct
  REGION 1..40: note = Synthetic
KPRLLLFSPSVVHLGVPLSVGVQLQDVPRGQVVKGSVFLR

SEQ ID NO: 2295 - protein, 15 aa, synthetic construct
  REGION 1..15: note = Synthetic
DDPDAPLQPVTPLQL

SEQ ID NO: 2296 - protein, 13 aa, synthetic construct
  REGION 1..13: note = Synthetic
GLEEELQFSLGSK

SEQ ID NO: 2297 - protein, 25 aa, synthetic construct
  REGION 1..25: note = Synthetic
TLEIPGNSDPNMIPDGDFNSYVRVT

SEQ ID NO: 2298 - protein, 18 aa, synthetic construct
  REGION 1..18: note = Synthetic
LFSPSVVHLGVPLSVGVQ

SEQ ID NO: 2299 - protein, 16 aa, synthetic construct
  REGION 1..16: note = Synthetic
LSVSAGSPHPAIARLT

SEQ ID NO: 2300 - protein, 25 aa, synthetic construct
  REGION 1..25: note = Synthetic
VAAPPSGGPGFLSIERPDSRPPRVG

SEQ ID NO: 2301 - protein, 14 aa, synthetic construct
  REGION 1..14: note = Synthetic
LFSPSVVHLGVPLS

SEQ ID NO: 2302 - protein, 19 aa, synthetic construct
  REGION 1..19: note = Synthetic
PDAPLQPVTPLQLFEGRRN

SEQ ID NO: 2303 - protein, 20 aa, synthetic construct
  REGION 1..20: note = Synthetic
DPDAPLQPVTPLQLFEGRRN

SEQ ID NO: 2304 - protein, 13 aa, synthetic construct
  REGION 1..13: note = Synthetic
FSPSVVHLGVPLS

SEQ ID NO: 2305 - protein, 27 aa, synthetic construct
  REGION 1..27: note = Synthetic
DELPAKDDPDAPLQPVTPLQLFEGRRN

SEQ ID NO: 2306 - protein, 29 aa, synthetic construct
  REGION 1..29: note = Synthetic
LFSPSVVHLGVPLSVGVQLQDVPRGQVVK

SEQ ID NO: 2307 - protein, 10 aa, synthetic construct
  REGION 1..10: note = Synthetic
LFSPSVVHLG

SEQ ID NO: 2308 - protein, 23 aa, synthetic construct
  REGION 1..23: note = Synthetic
APPSGGPGFLSIERPDSRPPRVG

SEQ ID NO: 2309 - protein, 18 aa, synthetic construct
  REGION 1..18: note = Synthetic
EEAPSLRPAPPPISGGGY

SEQ ID NO: 2310 - protein, 17 aa, synthetic construct
  REGION 1..17: note = Synthetic
EAPSLRPAPPPISGGGY

SEQ ID NO: 2311 - protein, 19 aa, synthetic construct
  REGION 1..19: note = Synthetic
REEAPSLRPAPPPISGGGY

SEQ ID NO: 2312 - protein, 41 aa, synthetic construct
  REGION 1..41: note = Synthetic
QGVNDNEEGFFSARGHRPLDKKREEAPSLRPAPPPISGGGY

SEQ ID NO: 2313 - protein, 14 aa, synthetic construct
  REGION 1..14: note = Synthetic
QGVNDNEEGFFSAR

SEQ ID NO: 2314 - protein, 16 aa, synthetic construct
  REGION 1..16: note = Synthetic
QGVNDNEEGFFSARGH

SEQ ID NO: 2315 - protein, 13 aa, synthetic construct
  REGION 1..13: note = Synthetic
QGVNDNEEGFFSA

SEQ ID NO: 2316 - protein, 24 aa, synthetic construct
  REGION 1..24: note = Synthetic
QGVNDNEEGFFSARGHRPLDKKRE

SEQ ID NO: 2317 - protein, 20 aa, synthetic construct
  REGION 1..20: note = Synthetic
KREEAPSLRPAPPPISGGGY

SEQ ID NO: 2318 - protein, 42 aa, synthetic construct
  REGION 1..42: note = Synthetic
QGVNDNEEGFFSARGHRPLDKKREEAPSLRPAPPPISGGGYR

SEQ ID NO: 2319 - protein, 20 aa, synthetic construct
  REGION 1..20: note = Synthetic
QGVNDNEEGFFSARGHRPLD

SEQ ID NO: 2320 - protein, 22 aa, synthetic construct
  REGION 1..22: note = Synthetic
DKKREEAPSLRPAPPPISGGGY

SEQ ID NO: 2321 - protein, 23 aa, synthetic construct
  REGION 1..23: note = Synthetic
QGVNDNEEGFFSARGHRPLDKKR

SEQ ID NO: 2322 - protein, 10 aa, synthetic construct
  REGION 1..10: note = Synthetic
NDNEEGFFSA

SEQ ID NO: 2323 - protein, 47 aa, synthetic construct
  REGION 1..47: note = Synthetic
QGVNDNEEGFFSARGHRPLDKKREEAPSLRPAPPPISGGGYRARPAK

SEQ ID NO: 2324 - protein, 12 aa, synthetic construct
  REGION 1..12: note = Synthetic
QGVNDNEEGFFS

SEQ ID NO: 2325 - protein, 18 aa, synthetic construct
  REGION 1..18: note = Synthetic
VNDNEEGFFSARGHRPLD

SEQ ID NO: 2326 - protein, 40 aa, synthetic construct
  REGION 1..40: note = Synthetic
VNDNEEGFFSARGHRPLDKKREEAPSLRPAPPPISGGGYR

SEQ ID NO: 2327 - protein, 19 aa, synthetic construct
  REGION 1..19: note = Synthetic
VNDNEEGFFSARGHRPLDK

SEQ ID NO: 2328 - protein, 29 aa, synthetic construct
  REGION 1..29: note = Synthetic
QGVNDNEEGFFSARGHRPLDKKREEAPSL

SEQ ID NO: 2329 - protein, 28 aa, synthetic construct
  REGION 1..28: note = Synthetic
QGVNDNEEGFFSARGHRPLDKKREEAPS

SEQ ID NO: 2330 - protein, 22 aa, synthetic construct
  REGION 1..22: note = Synthetic
QGVNDNEEGFFSARGHRPLDKK

SEQ ID NO: 2331 - protein, 11 aa, synthetic construct
  REGION 1..11: note = Synthetic
VNDNEEGFFSA

SEQ ID NO: 2332 - protein, 21 aa, synthetic construct
  REGION 1..21: note = Synthetic
KREEAPSLRPAPPPISGGGYR

SEQ ID NO: 2333 - protein, 27 aa, synthetic construct
  REGION 1..27: note = Synthetic
GHRPLDKKREEAPSLRPAPPPISGGGY

SEQ ID NO: 2334 - protein, 17 aa, synthetic construct
  REGION 1..17: note = Synthetic
NDNEEGFFSARGHRPLD

SEQ ID NO: 2335 - protein, 45 aa, synthetic construct
  REGION 1..45: note = Synthetic
QGVNDNEEGFFSARGHRPLDKKREEAPSLRPAPPPISGGGYRARP

SEQ ID NO: 2336 - protein, 49 aa, synthetic construct
  REGION 1..49: note = Synthetic
QGVNDNEEGFFSARGHRPLDKKREEAPSLRPAPPPISGGGYRARPAKAA

SEQ ID NO: 2337 - protein, 9 aa, synthetic construct
  REGION 1..9: note = Synthetic
DNEEGFFSA

SEQ ID NO: 2338 - protein, 37 aa, synthetic construct
  REGION 1..37: note = Synthetic
QGVNDNEEGFFSARGHRPLDKKREEAPSLRPAPPPIS

SEQ ID NO: 2339 - protein, 25 aa, synthetic construct
  REGION 1..25: note = Synthetic
QGVNDNEEGFFSARGHRPLDKKREE

SEQ ID NO: 2340 - protein, 46 aa, synthetic construct
  REGION 1..46: note = Synthetic
QGVNDNEEGFFSARGHRPLDKKREEAPSLRPAPPPISGGGYRARPA

SEQ ID NO: 2341 - protein, 12 aa, synthetic construct
  REGION 1..12: note = Synthetic
RSFFSFLGEAFD

SEQ ID NO: 2342 - protein, 38 aa, synthetic construct
  REGION 1..38: note = Synthetic
DGARDMWRAYSDMREANYIGSDKYFHARGNYDAAKRGP

SEQ ID NO: 2343 - protein, 11 aa, synthetic construct
  REGION 1..11: note = Synthetic
SFFSFLGEAFD

SEQ ID NO: 2344 - protein, 44 aa, synthetic construct
  REGION 1..44: note = Synthetic
FLGEAFDGARDMWRAYSDMREANYIGSDKYFHARGNYDAAKRGP

SEQ ID NO: 2345 - protein, 36 aa, synthetic construct
  REGION 1..36: note = Synthetic
FFGHGAEDSLADQAANEWGRSGKDPNHFRPAGLPEK

SEQ ID NO: 2346 - protein, 45 aa, synthetic construct
  REGION 1..45: note = Synthetic
SFLGEAFDGARDMWRAYSDMREANYIGSDKYFHARGNYDAAKRGP

SEQ ID NO: 2347 - protein, 20 aa, synthetic construct
  REGION 1..20: note = Synthetic
DQAANEWGRSGKDPNHFRPA

SEQ ID NO: 2348 - protein, 15 aa, synthetic construct
  REGION 1..15: note = Synthetic
ARENIQRFFGHGAED

SEQ ID NO: 2349 - protein, 42 aa, synthetic construct
  REGION 1..42: note = Synthetic
GEAFDGARDMWRAYSDMREANYIGSDKYFHARGNYDAAKRGP

SEQ ID NO: 2350 - protein, 7 aa, synthetic construct
  REGION 1..7: note = Synthetic
RSFFSFL

SEQ ID NO: 2351 - protein, 26 aa, synthetic construct
  REGION 1..26: note = Synthetic
GPRRYTIAALLSPYSYSTTAVVTNPK

SEQ ID NO: 2352 - protein, 37 aa, synthetic construct
  REGION 1..37: note = Synthetic
MEPLGRQLTSGPNQEQVSPLTLLKLGNQEPGGQTALK

SEQ ID NO: 2353 - protein, 24 aa, synthetic construct
  REGION 1..24: note = Synthetic
MEPLGRQLTSGPNQEQVSPLTLLK

SEQ ID NO: 2354 - protein, 25 aa, synthetic construct
  REGION 1..25: note = Synthetic
NQEQVSPLTLLKLGNQEPGGQTALK

SEQ ID NO: 2355 - protein, 15 aa, synthetic construct
  REGION 1..15: note = Synthetic
SGPNQEQVSPLTLLK

SEQ ID NO: 2356 - protein, 12 aa, synthetic construct
  REGION 1..12: note = Synthetic
MEPLGRQLTSGP

SEQ ID NO: 2357 - protein, 11 aa, synthetic construct
  REGION 1..11: note = Synthetic
EPLGRQLTSGP

SEQ ID NO: 2358 - protein, 12 aa, synthetic construct
  REGION 1..12: note = Synthetic
NQEQVSPLTLLK

SEQ ID NO: 2359 - protein, 14 aa, synthetic construct
  REGION 1..14: note = Synthetic
NQEQVSPLTLLKLG

SEQ ID NO: 2360 - protein, 45 aa, synthetic construct
  REGION 1..45: note = Synthetic
MSLSSFSVNRPFLFFIFEDTTGLPLFVGSVRNPNPSAPRELKEQQ

SEQ ID NO: 2361 - protein, 22 aa, synthetic construct
  REGION 1..22: note = Synthetic
MEPLGRQLTSGPNQEQVSPLTL

SEQ ID NO: 2362 - protein, 29 aa, synthetic construct
  REGION 1..29: note = Synthetic
LATVYVDVLKDSGRDYVSQFEGSALGKQL

SEQ ID NO: 2363 - protein, 23 aa, synthetic construct
  REGION 1..23: note = Synthetic
DEPPQSPWDRVKDLATVYVDVLK

SEQ ID NO: 2364 - protein, 13 aa, synthetic construct
  REGION 1..13: note = Synthetic
NLEKETEGLRQEM

SEQ ID NO: 2365 - protein, 13 aa, synthetic construct
  REGION 1..13: note = Synthetic
DEPPQSPWDRVKD

SEQ ID NO: 2366 - protein, 15 aa, synthetic construct
  REGION 1..15: note = Synthetic
AELQEGARQKLHELQ

SEQ ID NO: 2367 - protein, 22 aa, synthetic construct
  REGION 1..22: note = Synthetic
AELQEGARQKLHELQEKLSPLG

SEQ ID NO: 2368 - protein, 18 aa, synthetic construct
  REGION 1..18: note = Synthetic
DEPPQSPWDRVKDLATVY

SEQ ID NO: 2369 - protein, 10 aa, synthetic construct
  REGION 1..10: note = Synthetic
NSPLDEENLT

SEQ ID NO: 2370 - protein, 27 aa, synthetic construct
  REGION 1..27: note = Synthetic
HPNSPLDEENLTQENQDRGTHVDLGLA

SEQ ID NO: 2371 - protein, 30 aa, synthetic construct
  REGION 1..30: note = Synthetic
RSLQDTEEKSRSFSASQADPLSDPDQMNED

SEQ ID NO: 2372 - protein, 29 aa, synthetic construct
  REGION 1..29: note = Synthetic
RSLQDTEEKSRSFSASQADPLSDPDQMNE

SEQ ID NO: 2373 - protein, 28 aa, synthetic construct
  REGION 1..28: note = Synthetic
LQDTEEKSRSFSASQADPLSDPDQMNED

SEQ ID NO: 2374 - protein, 29 aa, synthetic construct
  REGION 1..29: note = Synthetic
SLQDTEEKSRSFSASQADPLSDPDQMNED

SEQ ID NO: 2375 - protein, 21 aa, synthetic construct
  REGION 1..21: note = Synthetic
HSQGTFTSDYSKYLDSRRAQD

SEQ ID NO: 2376 - protein, 27 aa, synthetic construct
  REGION 1..27: note = Synthetic
LQDTEEKSRSFSASQADPLSDPDQMNE

SEQ ID NO: 2377 - protein, 29 aa, synthetic construct
  REGION 1..29: note = Synthetic
HSQGTFTSDYSKYLDSRRAQDFVQWLMNT

SEQ ID NO: 2378 - protein, 27 aa, synthetic construct
  REGION 1..27: note = Synthetic
QDTEEKSRSFSASQADPLSDPDQMNED

SEQ ID NO: 2379 - protein, 28 aa, synthetic construct
  REGION 1..28: note = Synthetic
SLQDTEEKSRSFSASQADPLSDPDQMNE

SEQ ID NO: 2380 - protein, 48 aa, synthetic construct
  REGION 1..48: note = Synthetic
DFPEEVAIVEELGRRHADGSFSDEMNTILDNLAARDFINWLIQTKITD

SEQ ID NO: 2381 - protein, 37 aa, synthetic construct
  REGION 1..37: note = Synthetic
HDEFERHAEGTFTSDVSSYLEGQAAKEFIAWLVKGRG

SEQ ID NO: 2382 - protein, 30 aa, synthetic construct
  REGION 1..30: note = Synthetic
SVFPQQTGQLAELQPQDRAGARASWMPMFQ

SEQ ID NO: 2383 - protein, 28 aa, synthetic construct
  REGION 1..28: note = Synthetic
SVFPQQTGQLAELQPQDRAGARASWMPM

SEQ ID NO: 2384 - protein, 27 aa, synthetic construct
  REGION 1..27: note = Synthetic
SVFPQQTGQLAELQPQDRAGARASWMP

SEQ ID NO: 2385 - protein, 23 aa, synthetic construct
  REGION 1..23: note = Synthetic
SVFPQQTGQLAELQPQDRAGARA

SEQ ID NO: 2386 - protein, 24 aa, synthetic construct
  REGION 1..24: note = Synthetic
SVFPQQTGQLAELQPQDRAGARAS

SEQ ID NO: 2387 - protein, 21 aa, synthetic construct
  REGION 1..21: note = Synthetic
SVFPQQTGQLAELQPQDRAGA

SEQ ID NO: 2388 - protein, 20 aa, synthetic construct
  REGION 1..20: note = Synthetic
QQTGQLAELQPQDRAGARAS

SEQ ID NO: 2389 - protein, 23 aa, synthetic construct
  REGION 1..23: note = Synthetic
VFPQQTGQLAELQPQDRAGARAS

SEQ ID NO: 2390 - protein, 17 aa, synthetic construct
  REGION 1..17: note = Synthetic
QQTGQLAELQPQDRAGA

SEQ ID NO: 2391 - protein, 12 aa, synthetic construct
  REGION 1..12: note = Synthetic
SVFPQQTGQLAE

SEQ ID NO: 2392 - protein, 22 aa, synthetic construct
  REGION 1..22: note = Synthetic
SVFPQQTGQLAELQPQDRAGAR

SEQ ID NO: 2393 - protein, 15 aa, synthetic construct
  REGION 1..15: note = Synthetic
SVFPQQTGQLAELQP

SEQ ID NO: 2394 - protein, 26 aa, synthetic construct
  REGION 1..26: note = Synthetic
TGRGAEDSLADQAANKWGRSGRDPNH

SEQ ID NO: 2395 - protein, 27 aa, synthetic construct
  REGION 1..27: note = Synthetic
LTGRGAEDSLADQAANKWGRSGRDPNH

SEQ ID NO: 2396 - protein, 22 aa, synthetic construct
  REGION 1..22: note = Synthetic
AEDSLADQAANKWGRSGRDPNH

SEQ ID NO: 2397 - protein, 11 aa, synthetic construct
  REGION 1..11: note = Synthetic
GPGGAWAAEVI

SEQ ID NO: 2398 - protein, 17 aa, synthetic construct
  REGION 1..17: note = Synthetic
SDKPDMAEIEKFDKSKL

SEQ ID NO: 2399 - protein, 21 aa, synthetic construct
  REGION 1..21: note = Synthetic
SDKPDMAEIEKFDKSKLKKTE

SEQ ID NO: 2400 - protein, 24 aa, synthetic construct
  REGION 1..24: note = Synthetic
SDKPDMAEIEKFDKSKLKKTETQE

SEQ ID NO: 2401 - protein, 21 aa, synthetic construct
  REGION 1..21: note = Synthetic
ILGGHLDAKGSFPWQAKMVSH

SEQ ID NO: 2402 - protein, 22 aa, synthetic construct
  REGION 1..22: note = Synthetic
ILGGHLDAKGSFPWQAKMVSHH

SEQ ID NO: 2403 - protein, 19 aa, synthetic construct [sequence omitted]

SEQ ID NO: 2404 - protein, 15 aa, synthetic construct
  REGION 1..15: note = Synthetic
ILGGHLDAKGSFPWQ

SEQ ID NO: 2405 - protein, 10 aa, synthetic construct
  REGION 1..10: note = Synthetic
AVIALLLWGQ

SEQ ID NO: 2406 - protein, 11 aa, synthetic construct
  REGION 1..11: note = Synthetic
GAVIALLLWGQ

SEQ ID NO: 2407 - protein, 32 aa, synthetic construct
  REGION 1..32: note = Synthetic
VLSPADKTNVKAAWGKVGAHAGEYGAEALERM

SEQ ID NO: 2408 - protein, 33 aa, synthetic construct
  REGION 1..33: note = Synthetic
VLSPADKTNVKAAWGKVGAHAGEYGAEALERMF

SEQ ID NO: 2409 - protein, 36 aa, synthetic construct
  REGION 1..36: note = Synthetic
VLSPADKTNVKAAWGKVGAHAGEYGAEALERMFLSF

SEQ ID NO: 2410 - protein, 18 aa, synthetic construct
  REGION 1..18: note = Synthetic
VLSPADKTNVKAAWGKVG

SEQ ID NO: 2411 - protein, 18 aa, synthetic construct
  REGION 1..18: note = Synthetic
GEDAAQAEKFQHPGSDMR

SEQ ID NO: 2412 - protein, 14 aa, synthetic construct
  REGION 1..14: note = Synthetic
GEDAAQAEKFQHPG

SEQ ID NO: 2413 - protein, 17 aa, synthetic construct
  REGION 1..17: note = Synthetic
GEDAAQAEKFQHPGSDM

SEQ ID NO: 2414 - protein, 17 aa, synthetic construct
  REGION 1..17: note = Synthetic
APGLPPAGSPPDSHVLL

SEQ ID NO: 2415 - protein, 18 aa, synthetic construct
  REGION 1..18: note = Synthetic
APGLPPAGSPPDSHVLLA

SEQ ID NO: 2416 - protein, 38 aa, synthetic construct
  REGION 1..38: note = Synthetic
AAPPGHQLHRAHYDLRHTFMGVVSLGSPSGEVSHPRKT

SEQ ID NO: 2417 - protein, 55 aa, synthetic construct
  REGION 1..55: note = Synthetic
APGLPPAGSPPDSHVLLAAPPGHQLHRAHYDLRHTFMGVVSLGSPSGEVSHPRKT

SEQ ID NO: 2418 - protein, 37 aa, synthetic construct
  REGION 1..37: note = Synthetic
APPGHQLHRAHYDLRHTFMGVVSLGSPSGEVSHPRKT

SEQ ID NO: 2419 - protein, 16 aa, synthetic construct
  REGION 1..16: note = Synthetic
APGLPPAGSPPDSHVL

SEQ ID NO: 2420 - protein, 36 aa, synthetic construct
  REGION 1..36: note = Synthetic
AAPPGHQLHRAHYDLRHTFMGVVSLGSPSGEVSHPR

SEQ ID NO: 2421 - protein, 34 aa, synthetic construct
  REGION 1..34: note = Synthetic
HSGFEDELSEVLENQSSQAELKEAVEEPSSKDVM

SEQ ID NO: 2422 - protein, 35 aa, synthetic construct
  REGION 1..35: note = Synthetic
HSGFEDELSEVLENQSSQAELKEAVEEPSSKDVME

SEQ ID NO: 2423 - protein, 44 aa, synthetic construct
  REGION 1..44: note = Synthetic
GYPEEKKEEEGSANRRPEDQELESLSAIEAELEKVAHQLQALRR

SEQ ID NO: 2424 - protein, 34 aa, synthetic construct; identical to SEQ ID NO: 2421
  REGION 1..34: note = Synthetic

SEQ ID NO: 2425 - protein, 33 aa, synthetic construct
  REGION 1..33: note = Synthetic
LEGQEEEEDNRDSSMKLSFRARAYGFRGPGPQL

SEQ ID NO: 2426 - protein, 19 aa, synthetic construct
  REGION 1..19: note = Synthetic
LEGQEEEEDNRDSSMKLSF

SEQ ID NO: 2427 - protein, 17 aa, synthetic construct
  REGION 1..17: note = Synthetic
SSKITHRIHWESASLLR

SEQ ID NO: 2428 - protein, 16 aa, synthetic construct
  REGION 1..16: note = Synthetic
SSKITHRIHWESASLL

SEQ ID NO: 2429 - protein, 12 aa, synthetic construct
  REGION 1..12: note = Synthetic
THRIHWESASLL

SEQ ID NO: 2430 - protein, 14 aa, synthetic construct
  REGION 1..14: note = Synthetic
KITHRIHWESASLL

SEQ ID NO: 2431 - protein, 28 aa, synthetic construct
  REGION 1..28: note = Synthetic
SPMYSIITPNILRLESEETMVLEAHDAQ

SEQ ID NO: 2432 - protein, 10 aa, synthetic construct
  REGION 1..10: note = Synthetic
RIHWESASLL

SEQ ID NO: 2433 - protein, 11 aa, synthetic construct
  REGION 1..11: note = Synthetic
HRIHWESASLL

SEQ ID NO: 2434 - protein, 8 aa, synthetic construct
  REGION 1..8: note = Synthetic
HWESASLL

SEQ ID NO: 2435 - protein, 9 aa, synthetic construct
  REGION 1..9: note = Synthetic
IHWESASLL

SEQ ID NO: 2436 - protein, 42 aa, synthetic construct
  REGION 1..42: note = Synthetic
TSAGTRQPQFISRDWHGVPGQVDAAMAGRIYISGMAPRPSLA

SEQ ID NO: 2437 - protein, 29 aa, synthetic construct
  REGION 1..29: note = Synthetic
TRQPQFISRDWHGVPGQVDAAMAGRIYIS

SEQ ID NO: 2438 - protein, 33 aa, synthetic construct
  REGION 1..33: note = Synthetic
LQAQSKGNPEQTPVLKPEEEAPAPEVGASKPEG

SEQ ID NO: 2439 - protein, 46 aa, synthetic construct
  REGION 1..46: note = Synthetic
FWGRTSAGTRQPQFISRDWHGVPGQVDAAMAGRIYISGMAPRPSLA

SEQ ID NO: 2440 - protein, 35 aa, synthetic construct
  REGION 1..35: note = Synthetic
TRQPQFISRDWHGVPGQVDAAMAGRIYISGMAPRP

SEQ ID NO: 2441 - protein, 42 aa, synthetic construct; identical to SEQ ID NO: 2436
  REGION 1..42: note = Synthetic

SEQ ID NO: 2442 - protein, 44 aa, synthetic construct
  REGION 1..44: note = Synthetic
FWGRTSAGTRQPQFISRDWHGVPGQVDAAMAGRIYISGMAPRPS

SEQ ID NO: 2443 - protein, 27 aa, synthetic construct
  REGION 1..27: note = Synthetic
SVFLIKGDKVWVYPPEKKEKGYPKLLQ

SEQ ID NO: 2444 - protein, 17 aa, synthetic construct
  REGION 1..17: note = Synthetic
SVFLIKGDKVWVYPPEK

SEQ ID NO: 2445 - protein, 19 aa, synthetic construct
  REGION 1..19: note = Synthetic
SVFLIKGDKVWVYPPEKKE

SEQ ID NO: 2446 - protein, 14 aa, synthetic construct
  REGION 1..14: note = Synthetic
FPSPVDAAFRQGHN

SEQ ID NO: 2447 - protein, 16 aa, synthetic construct
  REGION 1..16: note = Synthetic
SVFLIKGDKVWVYPPE

SEQ ID NO: 2448 - protein, 16 aa, synthetic construct
  REGION 1..16: note = Synthetic
VYPPEKKEKGYPKLLQ

SEQ ID NO: 2449 - protein, 20 aa, synthetic construct
  REGION 1..20: note = Synthetic
HVQPQPQPKPQVQLHVQSQT

SEQ ID NO: 2450 - protein, 32 aa, synthetic construct
  REGION 1..32: note = Synthetic
LANTQPRGPPASSPAPAPKFSPVTPKFTPVAS

SEQ ID NO: 2451 - protein, 17 aa, synthetic construct
  REGION 1..17: note = Synthetic
HVQPQPQPKPQVQLHVQ

SEQ ID NO: 2452 - protein, 18 aa, synthetic construct
  REGION 1..18: note = Synthetic
AAPRPSPAISVSVSAPAF

SEQ ID NO: 2453 - protein, 24 aa, synthetic construct
  REGION 1..24: note = Synthetic
HVQPQPQPKPQVQLHVQSQTQPVS

SEQ ID NO: 2454 - protein, 21 aa, synthetic construct
  REGION 1..21: note = Synthetic
VNPFRPGDSEPPPAPGAQRAQ

SEQ ID NO: 2455 - protein, 25 aa, synthetic construct
  REGION 1..25: note = Synthetic
SEAEDASLLSFMQGYMKHATKTAKD

SEQ ID NO: 2456 - protein, 23 aa, synthetic construct
  REGION 1..23: note = Synthetic
SEAEDASLLSFMQGYMKHATKTA

SEQ ID NO: 2457 - protein, 39 aa, synthetic construct
  REGION 1..39: note = Synthetic
SEAEDASLLSFMQGYMKHATKTAKDALSSVQESQVAQQA

SEQ ID NO: 2458 - protein, 40 aa, synthetic construct
  REGION 1..40: note = Synthetic
VGPPKNDDTPNRQYWDEDLLMKVLEYLNQEKAEKGREHIA

SEQ ID NO: 2459 - protein, 42 aa, synthetic construct
  REGION 1..42: note = Synthetic
FPVGPPKNDDTPNRQYWDEDLLMKVLEYLNQEKAEKGREHIA

SEQ ID NO: 2460 - protein, 38 aa, synthetic construct
  REGION 1..38: note = Synthetic
VGPPKNDDTPNRQYWDEDLLMKVLEYLNQEKAEKGREH

SEQ ID NO: 2461 - protein, 38 aa, synthetic construct
  REGION 1..38: note = Synthetic
GQGSSEDDLQEEEQIEQAIKEHLNQGSSQETDKLAPVS

SEQ ID NO: 2462 - protein, 40 aa, synthetic construct
  REGION 1..40: note = Synthetic
VPGQGSSEDDLQEEEQIEQAIKEHLNQGSSQETDKLAPVS

SEQ ID NO: 2463 - protein, 13 aa, synthetic construct
  REGION 1..13: note = Synthetic
GRAGTEALPDGLS

SEQ ID NO: 2464 - protein, 10 aa, synthetic construct
  REGION 1..10: note = Synthetic
KHMQFPPMYE

SEQ ID NO: 2465 - protein, 23 aa, synthetic construct
  REGION 1..23: note = Synthetic
QTDMSRKAFVFPKESDTSYVSLK

SEQ ID NO: 2466 - protein, 27 aa, synthetic construct
  REGION 1..27: note = Synthetic
QTDMSRKAFVFPKESDTSYVSLKAPLT

SEQ ID NO: 2467 - protein, 21 aa, synthetic construct
  REGION 1..21: note = Synthetic
QTDMSRKAFVFPKESDTSYVS

SEQ ID NO: 2468 - protein, 32 aa, synthetic construct
  REGION 1..32: note = Synthetic
DAHKSEVAHRFKDLGEENFKALVLIAFAQYLQ

SEQ ID NO: 2469 - protein, 20 aa, synthetic construct
  REGION 1..20: note = Synthetic
DAHKSEVAHRFKDLGEENFK

SEQ ID NO: 2470 - protein, 24 aa, synthetic construct
  REGION 1..24: note = Synthetic
DAHKSEVAHRFKDLGEENFKALVL

SEQ ID NO: 2471 - protein, 20 aa, synthetic construct
  REGION 1..20: note = Synthetic
HKEDTLAFSEWGSPHAAVPR

SEQ ID NO: 2472 - protein, 25 aa, synthetic construct
  REGION 1..25: note = Synthetic
LEPVYPGDNATPEQMAQYAADLRRY

SEQ ID NO: 2473 - protein, 39 aa, synthetic construct
  REGION 1..39: note = Synthetic
AQGAPLEPVYPGDNATPEQMAQYAADLRRYINMLTRPRY

SEQ ID NO: 2474 - protein, 34 aa, synthetic construct
  REGION 1..34: note = Synthetic
LEPVYPGDNATPEQMAQYAADLRRYINMLTRPRY

SEQ ID NO: 2475 - protein, 37 aa, synthetic construct
  REGION 1..37: note = Synthetic
GRPEAQPPPLSSEHKEPVAGDAVPGPKDGSAPEVRGA

SEQ ID NO: 2476 - protein, 34 aa, synthetic construct
  REGION 1..34: note = Synthetic
GRPEAQPPPLSSEHKEPVAGDAVPGPKDGSAPEV

SEQ ID NO: 2477 - protein, 40 aa, synthetic construct
  REGION 1..40: note = Synthetic
APPGRPEAQPPPLSSEHKEPVAGDAVPGPKDGSAPEVRGA

SEQ ID NO: 2478 - protein, 18 aa, synthetic construct
  REGION 1..18: note = Synthetic
APPEPVPPPRAAPAPTHV

SEQ ID NO: 2479 - protein, 19 aa, synthetic construct
  REGION 1..19: note = Synthetic
NAPPEPVPPPRAAPAPTHV

SEQ ID NO: 2480 - protein, 37 aa, synthetic construct
  REGION 1..37: note = Synthetic
APPGRPEAQPPPLSSEHKEPVAGDAVPGPKDGSAPEV

SEQ ID NO: 2481 - protein, 8 aa, synthetic construct
  REGION 1..8: note = Synthetic
AEALLTET

SEQ ID NO: 2482 - protein, 38 aa, synthetic construct
  REGION 1..38: note = Synthetic
NAPPEPVPPPRAAPAPTHVRSPQPPPPAPAPARDELPD

SEQ ID NO: 2483 - protein, 23 aa, synthetic construct
  REGION 1..23: note = Synthetic
HVTDHIHAGMETTYTVLQNEDTK

SEQ ID NO: 2484 - protein, 17 aa, synthetic construct
  REGION 1..17: note = Synthetic
KEKHYYIGIIETTWDYA

SEQ ID NO: 2485 - protein, 15 aa, synthetic construct
  REGION 1..15: note = Synthetic
SPASSTTARVITNQY

SEQ ID NO: 2486 - protein, 25 aa, synthetic construct
  REGION 1..25: note = Synthetic
EILESEEKGDPNKPSGFRSVKAPVT

SEQ ID NO: 2487 - protein, 29 aa, synthetic construct
  REGION 1..29: note = Synthetic
NNPAGLYSSENISNFNNALESKTAASGVE

SEQ ID NO: 2488 - protein, 15 aa, synthetic construct
  REGION 1..15: note = Synthetic
TYAPVISAEKAYHEQ

SEQ ID NO: 2489 - protein, 16 aa, synthetic construct
  REGION 1..16: note = Synthetic
TYAPVISAEKAYHEQL

SEQ ID NO: 2490 - protein, 16 aa, synthetic construct
  REGION 1..16: note = Synthetic
AEKAYHEQLSVAEITN

SEQ ID NO: 2491 - protein, 31 aa, synthetic construct
  REGION 1..31: note = Synthetic
VHLTPEEKSAVTALWGKVNVDEVGGEALGRL

SEQ ID NO: 2492 - protein, 41 aa, synthetic construct
  REGION 1..41: note = Synthetic
VHLTPEEKSAVTALWGKVNVDEVGGEALGRLLVVYPWTQRF

SEQ ID NO: 2493 - protein, 10 aa, synthetic construct
  REGION 1..10: note = Synthetic
LVVYPWTQRF

SEQ ID NO: 2494 - protein, 22 aa, synthetic construct
  REGION 1..22: note = Synthetic
VGGTGGIGGVGGTGGVGNRAPR

SEQ ID NO: 2495 - protein, 21 aa, synthetic construct
  REGION 1..21: note = Synthetic
GGTGGIGGVGGTGGVGNRAPR

SEQ ID NO: 2496 - protein, 21 aa, synthetic construct
  REGION 1..21: note = Synthetic
VGGTGGIGGVGGTGGVGNRAP

SEQ ID NO: 2497 - protein, 23 aa, synthetic construct
  REGION 1..23: note = Synthetic
TVGGTGGIGGVGGTGGVGNRAPR

SEQ ID NO: 2498 - protein, 35 aa, synthetic construct
  REGION 1..35: note = Synthetic
FEIPINGLSEFVDYEDLVELAPGKFQLVAENRRYQ

SEQ ID NO: 2499 - protein, 31 aa, synthetic construct
  REGION 1..31: note = Synthetic
SILQMSLDHHIVTPLTSLVIENEAGDERMLA

SEQ ID NO: 2500 - protein, 34 aa, synthetic construct
  REGION 1..34: note = Synthetic
ASHTSDSDVPSGVTEVVVKLFDSDPITVTVPVEV

SEQ ID NO: 2501 - protein, 23 aa, synthetic construct
  REGION 1..23: note = Synthetic
AIQLTYNPDESSKPNMIDAATLK

SEQ ID NO: 2502 - protein, 21 aa, synthetic construct
  REGION 1..21: note = Synthetic
HLSPTGTTEFWLGNEKIHLIS

SEQ ID NO: 2503 - protein, 11 aa, synthetic construct
  REGION 1..11: note = Synthetic
SYVLTQPPSVS

SEQ ID NO: 2504 - protein, 10 aa, synthetic construct
  REGION 1..10: note = Synthetic
YVLTQPPSVS

SEQ ID NO: 2505 - protein, 23 aa, synthetic construct
  REGION 1..23: note = Synthetic
SETAPAAPAAPAPAEKTPVKKKA

SEQ ID NO: 2506 - protein, 19 aa, synthetic construct
  REGION 1..19: note = Synthetic
SETAPAAPAAPAPAEKTPV

SEQ ID NO: 2507 - protein, 20 aa, synthetic construct
  REGION 1..20: note = Synthetic
SETAPAAPAAPAPAEKTPVK

SEQ ID NO: 2508 - protein, 14 aa, synthetic construct
  REGION 1..14: note = Synthetic
THFGVLMDLPRSAS

SEQ ID NO: 2509 - protein, 18 aa, synthetic construct
  REGION 1..18: note = Synthetic
THFGVLMDLPRSASQLDA

SEQ ID NO: 2510 - protein, 10 aa, synthetic construct
  REGION 1..10: note = Synthetic
YELTQPPSVS

SEQ ID NO: 2511 - protein, 11 aa, synthetic construct
  REGION 1..11: note = Synthetic
SYELTQPPSVS

SEQ ID NO: 2512 - protein, 10 aa, synthetic construct
  REGION 1..10: note = Synthetic
SVLTQPPSVS

SEQ ID NO: 2513 - protein, 7 aa, synthetic construct
  REGION 1..7: note = Synthetic
TQPPSVS

SEQ ID NO: 2514 - protein, 11 aa, synthetic construct
  REGION 1..11: note = Synthetic
QSVLTQPPSVS

SEQ ID NO: 2515 - protein, 10 aa, synthetic construct
  REGION 1..10: note = Synthetic
SVLTQPPSVS

SEQ ID NO: 2516 - protein, 7 aa, synthetic construct
  REGION 1..7: note = Synthetic
TQPPSVS

SEQ ID NO: 2517 - protein, 16 aa, synthetic construct
  REGION 1..16: note = Synthetic
TPLGPKWPEPVFGRLA

SEQ ID NO: 2518 - protein, 12 aa, synthetic construct
  REGION 1..12: note = Synthetic
EIVLTQSPGTLS

SEQ ID NO: 2519 - protein, 11 aa, synthetic construct
  REGION 1..11: note = Synthetic
IVLTQSPGTLS

SEQ ID NO: 2520 - protein, 14 aa, synthetic construct
  REGION 1..14: note = Synthetic
DVVMTQSPLSLPVT

SEQ ID NO: 2521 - protein, 10 aa, synthetic construct
  REGION 1..10: note = Synthetic
DVVMTQSPLS

SEQ ID NO: 2522 - protein, 12 aa, synthetic construct
  REGION 1..12: note = Synthetic
FFQYDTWKQSTQ

SEQ ID NO: 2523 - protein, 14 aa, synthetic construct
  REGION 1..14: note = Synthetic
FFQYDTWKQSTQRL

SEQ ID NO: 2524 - protein, 11 aa, synthetic construct
  REGION 1..11: note = Synthetic
SYFVELGTQPA

SEQ ID NO: 2525 - protein, 19 aa, synthetic construct
  REGION 1..19: note = Synthetic
GTELVNFLSYFVELGTQPA

SEQ ID NO: 2526 - protein, 16 aa, synthetic construct
  REGION 1..16: note = Synthetic
TDYGKDLMEKVKSPEL

SEQ ID NO: 2527 - protein, 14 aa, synthetic construct
  REGION 1..14: note = Synthetic
DIVMTQTPLSSPVT

SEQ ID NO: 2528 - protein, 10 aa, synthetic construct
  REGION 1..10: note = Synthetic
DIVMTQTPLS

SEQ ID NO: 2529 - protein, 10 aa, synthetic construct
  REGION 1..10: note = Synthetic
SEYQTFFNPR

SEQ ID NO: 2530 - protein, 9 aa, synthetic construct
  REGION 1..9: note = Synthetic
EYQTFFNPR

SEQ ID NO: 2531 - protein, 17 aa, synthetic construct
  REGION 1..17: note = Synthetic
QHVFLAPQQARSLLQRV

SEQ ID NO: 2532 - protein, 17 aa, synthetic construct
  REGION 1..17: note = Synthetic
TVFLDHENANKILNRPK

SEQ ID NO: 2533 - protein, 15 aa, synthetic construct
  REGION 1..15: note = Synthetic
FLDHENANKILNRPK

SEQ ID NO: 2534 - protein, 26 aa, synthetic construct
  REGION 1..26: note = Synthetic
EEAGARVQQNVPSGTDTGDPQSKPLG

SEQ ID NO: 2535 - protein, 24 aa, synthetic construct
  REGION 1..24: note = Synthetic
EEAGARVQQNVPSGTDTGDPQSKP

SEQ ID NO: 2536 - protein, 21 aa, synthetic construct
  REGION 1..21: note = Synthetic
IETKGQYDEEEMTMQQAKRRQ

SEQ ID NO: 2537 - protein, 24 aa, synthetic construct
  REGION 1..24: note = Synthetic
ELRIETKGQYDEEEMTMQQAKRRQ

SEQ ID NO: 2538 - protein, 27 aa, synthetic construct
  REGION 1..27: note = Synthetic
AQPQFVHPEHRSFVDLSGHNLANPHPF

SEQ ID NO: 2539 - protein, 29 aa, synthetic construct
  REGION 1..29: note = Synthetic
MAAQPQFVHPEHRSFVDLSGHNLANPHPF

SEQ ID NO: 2540 - protein, 15 aa, synthetic construct
  REGION 1..15: note = Synthetic
VAWKADSSPVKAGVE

SEQ ID NO: 2541 - protein, 34 aa, synthetic construct
  REGION 1..34: note = Synthetic
VAWKADSSPVKAGVETTTPSKQSNNKYAASSYLS

SEQ ID NO: 2542 - protein, 23 aa, synthetic construct
  REGION 1..23: note = Synthetic
AGVETTTPSKQSNNKYAASSYLS

SEQ ID NO: 2543 - protein, 16 aa, synthetic construct
  REGION 1..16: note = Synthetic
QEQTYVISAPKIFRVG

SEQ ID NO: 2544 - protein, 19 aa, synthetic construct
  REGION 1..19: note = Synthetic
LSFSPSQSLPASHAHLRVT

SEQ ID NO: 2545 - protein, 17 aa, synthetic construct
  REGION 1..17: note = Synthetic
SVSGKPQYMVLVPSLLH

SEQ ID NO: 2546 - protein, 15 aa, synthetic construct
  REGION 1..15: note = Synthetic
AQQAADKYLYVDKNF

SEQ ID NO: 2547 - protein, 30 aa, synthetic construct
  REGION 1..30: note = Synthetic
TGLSMDGGGSPKGDVDPFYYDYETVRNGGL

SEQ ID NO: 2548 - protein, 17 aa, synthetic construct
  REGION 1..17: note = Synthetic
TGLSMDGGGSPKGDVDP

SEQ ID NO: 2549 - protein, 10 aa, synthetic construct
  REGION 1..10: note = Synthetic
DIVMTQSPLS

SEQ ID NO: 2550 - protein, 14 aa, synthetic construct
  REGION 1..14: note = Synthetic
DIVMTQSPLSLPVT

SEQ ID NO: 2551 - protein, 37 aa, synthetic construct
  REGION 1..37: note = Synthetic
SETSRTAFGGRRAVPPNNSNAAEDDLPTVELQGVVPR

SEQ ID NO: 2552 - protein, 31 aa, synthetic construct
  REGION 1..31: note = Synthetic
EAEDLQVGQVELGGGPGAGSLQPLALEGSLQ

SEQ ID NO: 2553 - protein, 12 aa, synthetic construct
  REGION 1..12: note = Synthetic
EIVLTQSPATLS

SEQ ID NO: 2554 - protein, 12 aa, synthetic construct
  REGION 1..12: note = Synthetic
DIQMTQSPSSLS

SEQ ID NO: 2555 - protein, 9 aa, synthetic construct
  REGION 1..9: note = Synthetic
FSFLPQPPQ

SEQ ID NO: 2556 - protein, 20 aa, synthetic construct
  REGION 1..20: note = Synthetic
QEEAQSWGHSSEQDGLRVPR

SEQ ID NO: 2557 - protein, 33 aa, synthetic construct
  REGION 1..33: note = Synthetic
QRDPVGRYEPAGGDANRLRRPGGSYPAAAAAKV

SEQ ID NO: 2558 - protein, 23 aa, synthetic construct
  REGION 1..23: note = Synthetic
QRDPVGRYEPAGGDANRLRRPGG

SEQ ID NO: 2559 - protein, 12 aa, synthetic construct
  REGION 1..12: note = Synthetic
QIFLPEPEQPSR

SEQ ID NO: 2560 - protein, 24 aa, synthetic construct
  REGION 1..24: note = Synthetic
IVRGDQPAASGDSDDDEPPPLPRL

SEQ ID NO: 2561 - protein, 11 aa, synthetic construct
  REGION 1..11: note = Synthetic
NFMLTQPHSVS

SEQ ID NO: 2562 - protein, 10 aa, synthetic construct
  REGION 1..10: note = Synthetic
FMLTQPHSVS

SEQ ID NO: 2563 - protein, 12 aa, synthetic construct
  REGION 1..12: note = Synthetic
EIVMTQSPATLS

SEQ ID NO: 2564 - protein, 13 aa, synthetic construct
  REGION 1..13: note = Synthetic
SVLLAQELPQQLT

SEQ ID NO: 2565 - protein, 24 aa, synthetic construct
  REGION 1..24: note = Synthetic
SETAPAAPAAAPPAEKAPVKKKAA

SEQ ID NO: 2566 - protein, 23 aa, synthetic construct
  REGION 1..23: note = Synthetic
TEKAPEPHVEEDDDDELDSKLNY

SEQ ID NO: 2567 - protein, 43 aa, synthetic construct
  REGION 1..43: note = Synthetic
EAPYGAPRFDMPDFEDDGGPYGESEAPAPPGPGTRWPYRSRDT

SEQ ID NO: 2568 - protein, 24 aa, synthetic construct
  REGION 1..24: note = Synthetic
DDILASPPRLPEPQPYPGAPHHSS

SEQ ID NO: 2569 - protein, 11 aa, synthetic construct
  REGION 1..11: note = Synthetic
QSALTQPPSVS

SEQ ID NO: 2570 - protein, 7 aa, synthetic construct
  REGION 1..7: note = Synthetic
TQPPSVS

SEQ ID NO: 2571 - protein, 33 aa, synthetic construct
  REGION 1..33: note = Synthetic
QQYNRVGKVEHGSVALPAIMRSGASGPENFQVG

SEQ ID NO: 2572 - protein, 43 aa, synthetic construct
  REGION 1..43: note = Synthetic
ADASEAHESSSRGEAGAPGEEDIQGPTKADTEKWAEGGGHSRE

SEQ ID NO: 2573 - protein, 17 aa, synthetic construct
  REGION 1..17: note = Synthetic
EPLQARADEVAAAPEQI

SEQ ID NO: 2574 - protein, 9 aa, synthetic construct
  REGION 1..9: note = Synthetic
QEFPDPEKF

SEQ ID NO: 2575 - protein, 30 aa, synthetic construct
  REGION 1..30: note = Synthetic
EKKEGHFSALPSLPVGSHAKVSSPQPRGPR

SEQ ID NO: 2576 - protein, 19 aa, synthetic construct
  REGION 1..19: note = Synthetic
EVQLVESGGGLVKPGGSLR

SEQ ID NO: 2577 - protein, 10 aa, synthetic construct
  REGION 1..10: note = Synthetic
SALTQPRSVS

SEQ ID NO: 2578 - protein, 9 aa, synthetic construct
  REGION 1..9: note = Synthetic
KLMPPPPPP

SEQ ID NO: 2579 - protein, 18 aa, synthetic construct
  REGION 1..18: note = Synthetic
DGPPGLPGTPGPPGPPGP

SEQ ID NO: 2580 - protein, 8 aa, synthetic construct
  REGION 1..8: note = Synthetic
RPPGFSPF

SEQ ID NO: 2581 - protein, 9 aa, synthetic construct
  REGION 1..9: note = Synthetic
FENKFAVET

SEQ ID NO: 2582 - protein, 33 aa, synthetic construct
  REGION 1..33: note = Synthetic
RHKAQPAHEAVEKETTEKEATEKEAEIVEADKE

SEQ ID NO: 2583 - protein, 10 aa, synthetic construct
  REGION 1..10: note = Synthetic
YELTQPSSVS

SEQ ID NO: 2584 - protein, 6 aa, synthetic construct
  REGION 1..6: note = Synthetic
QPLSFQ

SEQ ID NO: 2585 - protein, 22 aa, synthetic construct
  REGION 1..22: note = Synthetic
TIVEEVQDGKVISSREQVHQTT

SEQ ID NO: 2586 - protein, 17 aa, synthetic construct
  REGION 1..17: note = Synthetic
SVVPSPKVSDTVVEPYN

SEQ ID NO: 2587 - protein, 29 aa, synthetic construct
  REGION 1..29: note = Synthetic
AAPGQEPPEHMAELQRNEQEQPLGQWHLS

SEQ ID NO: 2588 - protein, 13 aa, synthetic construct
  REGION 1..13: note = Synthetic
DIVMTQSPDSLAV

SEQ ID NO: 2589 - protein, 13 aa, synthetic construct
  REGION 1..13: note = Synthetic
SIPIPQKLFGEVT

SEQ ID NO: 2590 - protein, 8 aa, synthetic construct
  REGION 1..8: note = Synthetic
QSATSPSP

SEQ ID NO: 2591 - protein, 6 aa, synthetic construct
  REGION 1..6: note = Synthetic
TVSPPG

SEQ ID NO: 2592 - protein, 14 aa, synthetic construct
  REGION 1..14: note = Synthetic
SKQPPPQPQHTPSP

SEQ ID NO: 2593 - protein, 12 aa, synthetic construct
  REGION 1..12: note = Synthetic
EGDFLAEGGGVR

SEQ ID NO: 2594 - protein, 15 aa, synthetic construct
  REGION 1..15: note = Synthetic
DSGEGDFLAEGGGVR

SEQ ID NO: 2595 - protein, 16 aa, synthetic construct
  REGION 1..16: note = Synthetic
NGFKSHALQLNNRQIR

SEQ ID NO: 2596 - protein, 17 aa, synthetic construct
  REGION 1..17: note = Synthetic
SSKITHRIHWESASLLR

SEQ ID NO: 2597 - protein, 31 aa, synthetic construct
  REGION 1..31: note = Synthetic
SYKMADEAGSEADHEGTHSTKRGHAKSRPVR

SEQ ID NO: 2598 - protein, 10 aa, synthetic construct
  REGION 1..10: note = Synthetic
KNGETGPQGP

SEQ ID NO: 2599 - protein, 10 aa, synthetic construct
  REGION 1..10: note = Synthetic
KTFGKMKPRY

SEQ ID NO: 2600 - protein, 10 aa, synthetic construct
  REGION 1..10: note = Synthetic
VKGDRGETGA

SEQ ID NO: 2601 - protein, 10 aa, synthetic construct
  REGION 1..10: note = Synthetic
RSSRIGEIKE

SEQ ID NO: 2602 - protein, 10 aa, synthetic construct
  REGION 1..10: note = Synthetic
QIRGLEEELQ

SEQ ID NO: 2603 - protein, 10 aa, synthetic construct
  REGION 1..10: note = Synthetic
SSRIGEIKEE

SEQ ID NO: 2604 - protein, 10 aa, synthetic construct
  REGION 1..10: note = Synthetic
SEETKENEGF

SEQ ID NO: 2605 - protein, 10 aa, synthetic construct
  REGION 1..10: note = Synthetic
SLLRSEETKE

SEQ ID NO: 2606 - protein, 10 aa, synthetic construct
  REGION 1..10: note = Synthetic
GLEEELQFSL

SEQ ID NO: 2607 - protein, 10 aa, synthetic construct
  REGION 1..10: note = Synthetic
SEETKENEGF

SEQ ID NO: 2608 - protein, 10 aa, synthetic construct
  REGION 1..10: note = Synthetic
GLEEELQFSL

SEQ ID NO: 2609 - protein, 10 aa, synthetic construct
  REGION 1..10: note = Synthetic
SLLRSEETKE

SEQ ID NO: 2610 - protein, 10 aa, synthetic construct
  REGION 1..10: note = Synthetic
NQEQVSPLTL

SEQ ID NO: 2611 - protein, 10 aa, synthetic construct
  REGION 1..10: note = Synthetic
KHNLGHGHKH

SEQ ID NO: 2612 - protein, 10 aa, synthetic construct
  REGION 1..10: note = Synthetic
SEETKENEGF

SEQ ID NO: 2613 - protein, 10 aa, synthetic construct
  REGION 1..10: note = Synthetic
SLLRSEETKE

SEQ ID NO: 2614 - protein, 10 aa, synthetic construct
  REGION 1..10: note = Synthetic
INVKVGGNSK

SEQ ID NO: 2615 - protein, 10 aa, synthetic construct
  REGION 1..10: note = Synthetic
GLEEELQFSL

SEQ ID NO: 2616 - protein, 10 aa, synthetic construct
  REGION 1..10: note = Synthetic
SLLRSEETKE

SEQ ID NO: 2617 - protein, 10 aa, synthetic construct
  REGION 1..10: note = Synthetic
QIRGLEEELQ

SEQ ID NO: 2618 - protein, 10 aa, synthetic construct
  REGION 1..10: note = Synthetic
RSLMPFSPYE

SEQ ID NO: 2619 - protein, 10 aa, synthetic construct
  REGION 1..10: note = Synthetic
YWEVQPATFR

SEQ ID NO: 2620 - protein, 10 aa, synthetic construct
  REGION 1..10: note = Synthetic
TGKLPYGYGP

SEQ ID NO: 2621 - protein, 10 aa, synthetic construct
  REGION 1..10: note = Synthetic
GLSPIFPGGA

SEQ ID NO: 2622 - protein, 10 aa, synthetic construct
  REGION 1..10: note = Synthetic
YKMADEAGSE

SEQ ID NO: 2623 - protein, 10 aa, synthetic construct
  REGION 1..10: note = Synthetic
KMADEAGSEA

SEQ ID NO: 2624 - protein, 10 aa, synthetic construct
  REGION 1..10: note = Synthetic
KSSSYSKQFT

SEQ ID NO: 2625 - protein, 10 aa, synthetic construct
  REGION 1..10: note = Synthetic
ADEAGSEADH

SEQ ID NO: 2626 - protein, 10 aa, synthetic construct
  REGION 1..10: note = Synthetic
GPRVVERHQS

SEQ ID NO: 2627 - protein, 10 aa, synthetic construct
  REGION 1..10: note = Synthetic
GPRVVERHQS

SEQ ID NO: 2628 - protein, 10 aa, synthetic construct
  REGION 1..10: note = Synthetic
RGPRVVERHQ

SEQ ID NO: 2629 - protein, 10 aa, synthetic construct
  REGION 1..10: note = Synthetic
DNTYNRVSED

SEQ ID NO: 2630 - protein, 10 aa, synthetic construct
  REGION 1..10: note = Synthetic
GPRVVERHQS

SEQ ID NO: 2631 - protein, 10 aa, synthetic construct
  REGION 1..10: note = Synthetic
DEAGSEADHE

SEQ ID NO: 2632 - protein, 10 aa, synthetic construct
  REGION 1..10: note = Synthetic
RGPRVVERHQ

SEQ ID NO: 2633 - protein, 10 aa, synthetic construct
  REGION 1..10: note = Synthetic
LERPGGNEIT

SEQ ID NO: 2634 - protein, 10 aa, synthetic construct
  REGION 1..10: note = Synthetic
GPRVVERHQS

SEQ ID NO: 2635 - protein, 10 aa, synthetic construct
  REGION 1..10: note = Synthetic
GSTGSWNSGS

SEQ ID NO: 2636 - protein, 10 aa, synthetic construct
  REGION 1..10: note = Synthetic
GPRVVERHQS

SEQ ID NO: 2637 - protein, 10 aa, synthetic construct
  REGION 1..10: note = Synthetic
DEAGSEADHE

SEQ ID NO: 2638 - protein, 10 aa, synthetic construct
  REGION 1..10: note = Synthetic
KSYKMADEAG

SEQ ID NO: 2639 - protein, 10 aa, synthetic construct
  REGION 1..10: note = Synthetic
ERHQSACKDS

SEQ ID NO: 2640 - protein, 10 aa, synthetic construct
  REGION 1..10: note = Synthetic
ALTDMPQMRM

SEQ ID NO: 2641 - protein, 10 aa, synthetic construct
  REGION 1..10: note = Synthetic
SQLQKVPPEW

SEQ ID NO: 2642 - protein, 10 aa, synthetic construct
  REGION 1..10: note = Synthetic
GPRVVERHQS

SEQ ID NO: 2643 - protein, 10 aa, synthetic construct
  REGION 1..10: note = Synthetic
VERHQSACKD

SEQ ID NO: 2644 - protein, 10 aa, synthetic construct
  REGION 1..10: note = Synthetic
KSSSYSKQFT

SEQ ID NO: 2645 - protein, 10 aa, synthetic construct
  REGION 1..10: note = Synthetic
SQLQKVPPEW

SEQ ID NO: 2646 - protein, 10 aa, synthetic construct
  REGION 1..10: note = Synthetic
KVPPEWKALT

SEQ ID NO: 2647 - protein, 10 aa, synthetic construct
  REGION 1..10: note = Synthetic
GSTGSWNSGS

SEQ ID NO: 2648 - protein, 10 aa, synthetic construct
  REGION 1..10: note = Synthetic
LERPGGNEIT

SEQ ID NO: 2649 - protein, 10 aa, synthetic construct
  REGION 1..10: note = Synthetic
KSSSYSKQFT

SEQ ID NO: 2650 - protein, 10 aa, synthetic construct
  REGION 1..10: note = Synthetic
ERHQSACKDS

SEQ ID NO: 2651 - protein, 10 aa, synthetic construct
  REGION 1..10: note = Synthetic
RDNTYNRVSE

SEQ ID NO: 2652 - protein, 10 aa, synthetic construct
  REGION 1..10: note = Synthetic
RHQSACKDSD

SEQ ID NO: 2653 - protein, 10 aa, synthetic construct
  REGION 1..10: note = Synthetic
DMPQMRMELE

SEQ ID NO: 2654 - protein, 10 aa, synthetic construct
  REGION 1..10: note = Synthetic
EEVSGNVSPG

SEQ ID NO: 2655 - protein, 10 aa, synthetic construct
  REGION 1..10: note = Synthetic
KSQLQKVPPE

SEQ ID NO: 2656 - protein, 10 aa, synthetic construct
  REGION 1..10: note = Synthetic
PSSAGSWNSG

SEQ ID NO: 2657 - protein, 10 aa, synthetic construct
  REGION 1..10: note = Synthetic
KSQLQKVPPE

SEQ ID NO: 2658 - protein, 10 aa, synthetic construct
  REGION 1..10: note = Synthetic
MELERPGGNE

SEQ ID NO: 2659 - protein, 10 aa, synthetic construct
  REGION 1..10: note = Synthetic
SACKDSDWPF

SEQ ID NO: 2660 - protein, 10 aa, synthetic construct
  REGION 1..10: note = Synthetic
DMPQMRMELE

SEQ ID NO: 2661 - protein, 10 aa, synthetic construct
  REGION 1..10: note = Synthetic
KSYKMADEAG

SEQ ID NO: 2662 - protein, 10 aa, synthetic construct
  REGION 1..10: note = Synthetic
KSSSYSKQFT

SEQ ID NO: 2663 - protein, 10 aa, synthetic construct
  REGION 1..10: note = Synthetic
PGSSGTGGTA

SEQ ID NO: 2664 - protein, 10 aa, synthetic construct
  REGION 1..10: note = Synthetic
KMADEAGSEA

SEQ ID NO: 2665 - protein, 10 aa, synthetic construct
  REGION 1..10: note = Synthetic
EEVSGNVSPG

SEQ ID NO: 2666 - protein, 10 aa, synthetic construct
  REGION 1..10: note = Synthetic
KSSSYSKQFT

SEQ ID NO: 2667 - protein, 10 aa, synthetic construct
  REGION 1..10: note = Synthetic
RPGGNEITRG

SEQ ID NO: 2668 - protein, 10 aa, synthetic construct
  REGION 1..10: note = Synthetic
KGDKELRTGK

SEQ ID NO: 2669 - protein, 10 aa, synthetic construct
  REGION 1..10: note = Synthetic
SGSSGPGSTG

SEQ ID NO: 2670 - protein, 10 aa, synthetic construct
  REGION 1..10: note = Synthetic
FFSPMLGEFV

SEQ ID NO: 2671 - protein, 10 aa, synthetic construct
  REGION 1..10: note = Synthetic
KSRPVRDCDD

SEQ ID NO: 2672 - protein, 10 aa, synthetic construct
  REGION 1..10: note = Synthetic
KSQLQKVPPE

SEQ ID NO: 2673 - protein, 10 aa, synthetic construct
  REGION 1..10: note = Synthetic
SNSTNIFFSP

SEQ ID NO: 2674 - protein, 21 aa, synthetic construct
  REGION 1..21: note = Synthetic
MIEQNTKSPLFMGKVVNPTQK

SEQ ID NO: 2675 - protein, 40 aa, synthetic construct
  REGION 1..40: note = Synthetic
AIPMSIPPEVKFNKPFVFLMIEQNTKSPLFMGKVVNPTQK

SEQ ID NO: 2676 - protein, 35 aa, synthetic construct
  REGION 1..35: note = Synthetic
IPPEVKFNKPFVFLMIEQNTKSPLFMGKVVNPTQK

SEQ ID NO: 2677 - protein, 47 aa, synthetic construct
  REGION 1..47: note = Synthetic
AGAMFLEAIPMSIPPEVKFNKPFVFLMIEQNTKSPLFMGKVVNPTQK

SEQ ID NO: 2678 - protein, 36 aa, synthetic construct
  REGION 1..36: note = Synthetic
SIPPEVKFNKPFVFLMIEQNTKSPLFMGKVVNPTQK

SEQ ID NO: 2679 - protein, 22 aa, synthetic construct
  REGION 1..22: note = Synthetic
LMIEQNTKSPLFMGKVVNPTQK

SEQ ID NO: 2680 - protein, 29 aa, synthetic construct
  REGION 1..29: note = Synthetic
FNKPFVFLMIEQNTKSPLFMGKVVNPTQK

SEQ ID NO: 2681 - protein, 41 aa, synthetic construct
  REGION 1..41: note = Synthetic
EAIPMSIPPEVKFNKPFVFLMIEQNTKSPLFMGKVVNPTQK

SEQ ID NO: 2682 - protein, 10 aa, synthetic construct
  REGION 1..10: note = Synthetic
SNSTNIFFSP

SEQ ID NO: 2683 - protein, 20 aa, synthetic construct
  REGION 1..20: note = Synthetic
IEQNTKSPLFMGKVVNPTQK

SEQ ID NO: 2684 - protein, 44 aa, synthetic construct
  REGION 1..44: note = Synthetic
MFLEAIPMSIPPEVKFNKPFVFLMIEQNTKSPLFMGKVVNPTQK

SEQ ID NO: 2685 - protein, 37 aa, synthetic construct
  REGION 1..37: note = Synthetic
MSIPPEVKFNKPFVFLMIEQNTKSPLFMGKVVNPTQK

SEQ ID NO: 2686 - protein, 43 aa, synthetic construct
  REGION 1..43: note = Synthetic
FLEAIPMSIPPEVKFNKPFVFLMIEQNTKSPLFMGKVVNPTQK

SEQ ID NO: 2687 - protein, 10 aa, synthetic construct
  REGION 1..10: note = Synthetic
NSTNIFFSPV

SEQ ID NO: 2688 - protein, 50 aa, synthetic construct
  REGION 1..50: note = Synthetic
TEAAGAMFLEAIPMSIPPEVKFNKPFVFLMIEQNTKSPLFMGKVVNPTQK

SEQ ID NO: 2689 - protein, 49 aa, synthetic construct
  REGION 1..49: note = Synthetic
EAAGAMFLEAIPMSIPPEVKFNKPFVFLMIEQNTKSPLFMGKVVNPTQK

SEQ ID NO: 2690 - protein, 41 aa, synthetic construct; identical to SEQ ID NO: 2681
  REGION 1..41: note = Synthetic

SEQ ID NO: 2691 - protein, 10 aa, synthetic construct
  REGION 1..10: note = Synthetic
NSTNIFFSPV

SEQ ID NO: 2692 - protein, 10 aa, synthetic construct
  REGION 1..10: note = Synthetic
QSNSTNIFFS

SEQ ID NO: 2693 - protein, 48 aa, synthetic construct
  REGION 1..48: note = Synthetic
AAGAMFLEAIPMSIPPEVKFNKPFVFLMIEQNTKSPLFMGKVVNPTQK

SEQ ID NO: 2694 - protein, 10 aa, synthetic construct
  REGION 1..10: note = Synthetic
QSNSTNIFFS

SEQ ID NO: 2695 - protein, 46 aa, synthetic construct
  REGION 1..46: note = Synthetic
GAMFLEAIPMSIPPEVKFNKPFVFLMIEQNTKSPLFMGKVVNPTQK

SEQ ID NO: 2696 - protein, 51 aa, synthetic construct
  REGION 1..51: note = Synthetic
GTEAAGAMFLEAIPMSIPPEVKFNKPFVFLMIEQNTKSPLFMGKVVNPTQK

SEQ ID NO: 2697 - protein, 45 aa, synthetic construct
  REGION 1..45: note = Synthetic
AMFLEAIPMSIPPEVKFNKPFVFLMIEQNTKSPLFMGKVVNPTQK

SEQ ID NO: 2698 - protein, 10 aa, synthetic construct
  REGION 1..10: note = Synthetic
HQSNSTNIFF

SEQ ID NO: 2699 - protein, 10 aa, synthetic construct
  REGION 1..10: note = Synthetic
SNSTNIFFSP

SEQ ID NO: 2700 - protein, 10 aa, synthetic construct
  REGION 1..10: note = Synthetic
GSVFLRNPSR

SEQ ID NO: 2701 - protein, 10 aa, synthetic construct
  REGION 1..10: note = Synthetic
QVVKGSVFLR

SEQ ID NO: 2702 - protein, 10 aa, synthetic construct
  REGION 1..10: note = Synthetic
NVPCSPKVDF

SEQ ID NO: 2703 - protein, 10 aa, synthetic construct
  REGION 1..10: note = Synthetic
VPCSPKVDFT

SEQ ID NO: 2704 - protein, 10 aa, synthetic construct
  REGION 1..10: note = Synthetic
VGVQLQDVPR

SEQ ID NO: 2705 - protein, 10 aa, synthetic construct
  REGION 1..10: note = Synthetic
LRNPSRNNVP

SEQ ID NO: 2706 - protein, 10 aa, synthetic construct
  REGION 1..10: note = Synthetic
DVPRGQVVKG

SEQ ID NO: 2707 - protein, 10 aa, synthetic construct
  REGION 1..10: note = Synthetic
LQDVPRGQVV

SEQ ID NO: 2708 - protein, 10 aa, synthetic construct
  REGION 1..10: note = Synthetic
RGLEEELQFS

SEQ ID NO: 2709 - protein, 10 aa, synthetic construct
  REGION 1..10: note = Synthetic
VPLSVGVQLQ

SEQ ID NO: 2710 - protein, 10 aa, synthetic construct
  REGION 1..10: note = Synthetic
GLEEELQFSL

SEQ ID NO: 2711 - protein, 10 aa, synthetic construct
  REGION 1..10: note = Synthetic
RRRREAPKVV

SEQ ID NO: 2712 - protein, 10 aa, synthetic construct
  REGION 1..10: note = Synthetic
LGVPLSVGVQ

SEQ ID NO: 2713 - protein, 10 aa, synthetic construct
  REGION 1..10: note = Synthetic
VGGNSKGTLK

SEQ ID NO: 2714 - protein, 10 aa, synthetic construct
  REGION 1..10: note = Synthetic
LQLFEGRRNR

SEQ ID NO: 2715 - protein, 10 aa, synthetic construct
  REGION 1..10: note = Synthetic
LQLFEGRRNR

SEQ ID NO: 2716 - protein, 10 aa, synthetic construct
  REGION 1..10: note = Synthetic
RGLEEELQFS

SEQ ID NO: 2717 - protein, 10 aa, synthetic construct
  REGION 1..10: note = Synthetic
LFEGRRNRRR

SEQ ID NO: 2718 - protein, 10 aa, synthetic construct
  REGION 1..10: note = Synthetic
NPSRNNVPCS

SEQ ID NO: 2719 - protein, 10 aa, synthetic construct
  REGION 1..10: note = Synthetic
FEGRRNRRRR

SEQ ID NO: 2720 - protein, 10 aa, synthetic construct
  REGION 1..10: note = Synthetic
INVKVGGNSK

SEQ ID NO: 2721 - protein, 10 aa, synthetic construct
  REGION 1..10: note = Synthetic
ASDPLDTLGS

SEQ ID NO: 2722 - protein, 10 aa, synthetic construct
  REGION 1..10: note = Synthetic
LQDVPRGQVV

SEQ ID NO: 2723 - protein, 10 aa, synthetic construct
  REGION 1..10: note = Synthetic
VAAPPSGGPG

SEQ ID NO: 2724 - protein, 10 aa, synthetic construct
  REGION 1..10: note = Synthetic
DTLNLNLRAV

SEQ ID NO: 2725 - protein, 10 aa, synthetic construct
  REGION 1..10: note = Synthetic
VGVQLQDVPR

SEQ ID NO: 2726 - protein, 10 aa, synthetic construct
  REGION 1..10: note = Synthetic
RRRREAPKVV

SEQ ID NO: 2727 - protein, 10 aa, synthetic construct
  REGION 1..10: note = Synthetic
RRRREAPKVV

SEQ ID NO: 2728 - protein, 10 aa, synthetic construct
  REGION 1..10: note = Synthetic
VGVQLQDVPR

SEQ ID NO: 2729 - protein, 10 aa, synthetic construct
  REGION 1..10: note = Synthetic
RRRREAPKVV

SEQ ID NO: 2730 - protein, 10 aa, synthetic construct
  REGION 1..10: note = Synthetic
GSVFLRNPSR

SEQ ID NO: 2731 - protein, 10 aa, synthetic construct
  REGION 1..10: note = Synthetic
VPLSVGVQLQ

SEQ ID NO: 2732 - protein, 10 aa, synthetic construct
  REGION 1..10: note = Synthetic
DTLNLNLRAV

SEQ ID NO: 2733 - protein, 10 aa, synthetic construct
  REGION 1..10: note = Synthetic
RARPAKAAAT

SEQ ID NO: 2734 - protein, 10 aa, synthetic construct
  REGION 1..10: note = Synthetic
RARPAKAAAT

SEQ ID NO: 2735 - protein, 10 aa, synthetic construct
  REGION 1..10: note = Synthetic
RARPAKAAAT

SEQ ID NO: 2736 - protein, 10 aa, synthetic construct
  REGION 1..10: note = Synthetic
RARPAKAAAT

SEQ ID NO: 2737 - protein, 10 aa, synthetic construct
  REGION 1..10: note = Synthetic
GHRPLDKKRE

SEQ ID NO: 2738 - protein, 10 aa, synthetic construct
  REGION 1..10: note = Synthetic
RPLDKKREEA

SEQ ID NO: 2739 - protein, 10 aa, synthetic construct
  REGION 1..10: note = Synthetic
RGHRPLDKKR

SEQ ID NO: 2740 - protein, 10 aa, synthetic construct
  REGION 1..10: note = Synthetic
EAPSLRPAPP

SEQ ID NO: 2741 - protein, 10 aa, synthetic construct
  REGION 1..10: note = Synthetic
RARPAKAAAT

SEQ ID NO: 2742 - protein, 9 aa, synthetic construct
  REGION 1..9: note = Synthetic
ARPAKAAAT

SEQ ID NO: 2743 - protein, 10 aa, synthetic construct
  REGION 1..10: note = Synthetic
KKREEAPSLR

SEQ ID NO: 2744 - protein, 10 aa, synthetic construct
  REGION 1..10: note = Synthetic
RARPAKAAAT

SEQ ID NO: 2745 - protein, 10 aa, synthetic construct
  REGION 1..10: note = Synthetic
EEAPSLRPAP

SEQ ID NO: 2746 - protein, 10 aa, synthetic construct
  REGION 1..10: note = Synthetic
RGHRPLDKKR

SEQ ID NO: 2747 - protein, 10 aa, synthetic construct
  REGION 1..10: note = Synthetic
AAATQKKVER

SEQ ID NO: 2748 - protein, 10 aa, synthetic construct
  REGION 1..10: note = Synthetic
ARGHRPLDKK

SEQ ID NO: 2749 - protein, 10 aa, synthetic construct
  REGION 1..10: note = Synthetic
KKREEAPSLR

SEQ ID NO: 2750 - protein, 10 aa, synthetic construct
  REGION 1..10: note = Synthetic
ARPAKAAATQ

SEQ ID NO: 2751 - protein, 10 aa, synthetic construct
  REGION 1..10: note = Synthetic
KREEAPSLRP

SEQ ID NO: 2752 - protein, 10 aa, synthetic construct
  REGION 1..10: note = Synthetic
RPAPPPISGG

SEQ ID NO: 2753 - protein, 10 aa, synthetic construct
  REGION 1..10: note = Synthetic
LRPAPPPISG

SEQ ID NO: 2754 - protein, 10 aa, synthetic construct
  REGION 1..10: note = Synthetic
REEAPSLRPA

SEQ ID NO: 2755 - protein, 10 aa, synthetic construct
  REGION 1..10: note = Synthetic
RGHRPLDKKR

SEQ ID NO: 2756 - protein, 10 aa, synthetic construct
  REGION 1..10: note = Synthetic
ARPAKAAATQ

SEQ ID NO: 2757 - protein, 10 aa, synthetic construct
  REGION 1..10: note = Synthetic
RARPAKAAAT

SEQ ID NO: 2758 - protein, 10 aa, synthetic construct
  REGION 1..10: note = Synthetic
KKREEAPSLR

SEQ ID NO: 2759 - protein, 10 aa, synthetic construct
  REGION 1..10: note = Synthetic
AKAAATQKKV

SEQ ID NO: 2760 - protein, 10 aa, synthetic construct
  REGION 1..10: note = Synthetic
ATQKKVERKA

SEQ ID NO: 2761 - protein, 8 aa, synthetic construct
  REGION 1..8: note = Synthetic
IRPFFPQQ

SEQ ID NO: 2762 - protein, 10 aa, synthetic construct
  REGION 1..10: note = Synthetic
RGHRPLDKKR

SEQ ID NO: 2763 - protein, 10 aa, synthetic construct
  REGION 1..10: note = Synthetic
GGGYRARPAK

SEQ ID NO: 2764 - protein, 10 aa, synthetic construct
  REGION 1..10: note = Synthetic
APSLRPAPPP

SEQ ID NO: 2765 - protein, 10 aa, synthetic construct
  REGION 1..10: note = Synthetic
KAAATQKKVE

SEQ ID NO: 2766 - protein, 37 aa, synthetic construct
  REGION 1..37: note = Synthetic
FFGHGAEDSLADQAANEWGRSGKDPNHFRPAGLPEKY

SEQ ID NO: 2767 - protein, 47 aa, synthetic construct
  REGION 1..47: note = Synthetic
ISDARENIQRFFGHGAEDSLADQAANEWGRSGKDPNHFRPAGLPEKY

SEQ ID NO: 2768 - protein, 29 aa, synthetic construct
  REGION 1..29: note = Synthetic
SLADQAANEWGRSGKDPNHFRPAGLPEKY

SEQ ID NO: 2769 - protein, 36 aa, synthetic construct
  REGION 1..36: note = Synthetic
FGHGAEDSLADQAANEWGRSGKDPNHFRPAGLPEKY

SEQ ID NO: 2770 - protein, 10 aa, synthetic construct
  REGION 1..10: note = Synthetic
GARDMWRAYS

SEQ ID NO: 2771 - protein, 13 aa, synthetic construct
  REGION 1..13: note = Synthetic
PNHFRPAGLPEKY

SEQ ID NO: 2772 - protein, 50 aa, synthetic construct
  REGION 1..50: note = Synthetic
AEAISDARENIQRFFGHGAEDSLADQAANEWGRSGKDPNHFRPAGLPEKY

SEQ ID NO: 2773 - protein, 23 aa, synthetic construct
  REGION 1..23: note = Synthetic
ANEWGRSGKDPNHFRPAGLPEKY

SEQ ID NO: 2774 - protein, 10 aa, synthetic construct
  REGION 1..10: note = Synthetic
GGVWAAEAIS

SEQ ID NO: 2775 - protein, 44 aa, synthetic construct
  REGION 1..44: note = Synthetic
ARENIQRFFGHGAEDSLADQAANEWGRSGKDPNHFRPAGLPEKY

SEQ ID NO: 2776 - protein, 10 aa, synthetic construct
  REGION 1..10: note = Synthetic
GARDMWRAYS

SEQ ID NO: 2777 - protein, 26 aa, synthetic construct
  REGION 1..26: note = Synthetic
DQAANEWGRSGKDPNHFRPAGLPEKY

SEQ ID NO: 2778 - protein, 10 aa, synthetic construct
  REGION 1..10: note = Synthetic
GGVWAAEVIS

SEQ ID NO: 2779 - protein, 25 aa, synthetic construct
  REGION 1..25: note = Synthetic
QAANEWGRSGKDPNHFRPAGLPEKY

SEQ ID NO: 2780 - protein, 38 aa, synthetic construct
  REGION 1..38: note = Synthetic
RFFGHGAEDSLADQAANEWGRSGKDPNHFRPAGLPEKY

SEQ ID NO: 2781 - protein, 33 aa, synthetic construct
  REGION 1..33: note = Synthetic
GAEDSLADQAANEWGRSGKDPNHFRPAGLPEKY

SEQ ID NO: 2782 - protein, 14 aa, synthetic construct
  REGION 1..14: note = Synthetic
DPNHFRPAGLPEKY

SEQ ID NO: 2783 - protein, 34 aa, synthetic construct
  REGION 1..34: note = Synthetic
HGAEDSLADQAANEWGRSGKDPNHFRPAGLPEKY

SEQ ID NO: 2784 - protein, 17 aa, synthetic construct
  REGION 1..17: note = Synthetic
SGKDPNHFRPAGLPEKY

SEQ ID NO: 2785 - protein, 22 aa, synthetic construct
  REGION 1..22: note = Synthetic
NEWGRSGKDPNHFRPAGLPEKY

SEQ ID NO: 2786 - protein, 45 aa, synthetic construct
  REGION 1..45: note = Synthetic
DARENIQRFFGHGAEDSLADQAANEWGRSGKDPNHFRPAGLPEKY

SEQ ID NO: 2787 - protein, 10 aa, synthetic construct
  REGION 1..10: note = Synthetic
GGVWAAEAIS

SEQ ID NO: 2788 - protein, 6 aa, synthetic construct
  REGION 1..6: note = Synthetic
GLPEKY

SEQ ID NO: 2789 - protein, 10 aa, synthetic construct
  REGION 1..10: note = Synthetic
SLADQAANEW

SEQ ID NO: 2790 - protein, 27 aa, synthetic construct
  REGION 1..27: note = Synthetic
ADQAANEWGRSGKDPNHFRPAGLPEKY

SEQ ID NO: 2791 - protein, 46 aa, synthetic construct
  REGION 1..46: note = Synthetic
SDARENIQRFFGHGAEDSLADQAANEWGRSGKDPNHFRPAGLPEKY

SEQ ID NO: 2792 - protein, 10 aa, synthetic construct
  REGION 1..10: note = Synthetic
GGVWAAEAIS

SEQ ID NO: 2793 - protein, 65 aa, synthetic construct
  REGION 1..65: note = Synthetic
GNYDAAKRGPGGVWAAEAISDARENIQRFFGHGAEDSLADQAANEWGRSGKDPNHFRPAGLPEKY

SEQ ID NO: 2794 - protein, 10 aa, synthetic construct
  REGION 1..10: note = Synthetic
GEAFDGARDM

SEQ ID NO: 2795 - protein, 55 aa, synthetic construct
  REGION 1..55: note = Synthetic
GGVWAAEAISDARENIQRFFGHGAEDSLADQAANEWGRSGKDPNHFRPAGLPEKY

SEQ ID NO: 2796 - protein, 29 aa, synthetic construct
  REGION 1..29: note = Synthetic
DSGPRRYTIAALLSPYSYSTTAVVTNPKE

SEQ ID NO: 2797 - protein, 27 aa, synthetic construct
  REGION 1..27: note = Synthetic
GPRRYTIAALLSPYSYSTTAVVTNPKE

SEQ ID NO: 2798 - protein, 28 aa, synthetic construct
  REGION 1..28: note = Synthetic
SGPRRYTIAALLSPYSYSTTAVVTNPKE

SEQ ID NO: 2799 - protein, 26 aa, synthetic construct
  REGION 1..26: note = Synthetic
PRRYTIAALLSPYSYSTTAVVTNPKE

SEQ ID NO: 2800 - protein, 16 aa, synthetic construct
  REGION 1..16: note = Synthetic
SPYSYSTTAVVTNPKE

SEQ ID NO: 2801 - protein, 19 aa, synthetic construct
  REGION 1..19: note = Synthetic
ALLSPYSYSTTAVVTNPKE

SEQ ID NO: 2802 - protein, 21 aa, synthetic construct
  REGION 1..21: note = Synthetic
IAALLSPYSYSTTAVVTNPKE

SEQ ID NO: 2803 - protein, 32 aa, synthetic construct
  REGION 1..32: note = Synthetic
TANDSGPRRYTIAALLSPYSYSTTAVVTNPKE

SEQ ID NO: 2804 - protein, 44 aa, synthetic construct
  REGION 1..44: note = Synthetic
ISPFHEHAEVVFTANDSGPRRYTIAALLSPYSYSTTAVVTNPKE

SEQ ID NO: 2805 - protein, 10 aa, synthetic construct
  REGION 1..10: note = Synthetic
SPPGVCSRDP

SEQ ID NO: 2806 - protein, 10 aa, synthetic construct
  REGION 1..10: note = Synthetic
LGNQEPGGQT

SEQ ID NO: 2807 - protein, 10 aa, synthetic construct
  REGION 1..10: note = Synthetic
SPPGVCSRDP

SEQ ID NO: 2808 - protein, 16 aa, synthetic construct
  REGION 1..16: note = Synthetic
LVPPMEEDYPQFGSPK

SEQ ID NO: 2809 - protein, 10 aa, synthetic construct
  REGION 1..10: note = Synthetic
LGNQEPGGQT

SEQ ID NO: 2810 - protein, 10 aa, synthetic construct
  REGION 1..10: note = Synthetic
NQEQVSPLTL

SEQ ID NO: 2811 - protein, 10 aa, synthetic construct
  REGION 1..10: note = Synthetic
NQEQVSPLTL

SEQ ID NO: 2812 - protein, 10 aa, synthetic construct
  REGION 1..10: note = Synthetic
LGNQEPGGQT

SEQ ID NO: 2813 - protein, 10 aa, synthetic construct
  REGION 1..10: note = Synthetic
NQEPGGQTAL

SEQ ID NO: 2814 - protein, 10 aa, synthetic construct
  REGION 1..10: note = Synthetic
DSPGNKDFLQ

SEQ ID NO: 2815 - protein, 10 aa, synthetic construct
  REGION 1..10: note = Synthetic
LKLGNQEPGG

SEQ ID NO: 2816 - protein, 22 aa, synthetic construct
  REGION 1..22: note = Synthetic
LESFKVSFLSALEEYTKKLNTQ

SEQ ID NO: 2817 - protein, 21 aa, synthetic construct
  REGION 1..21: note = Synthetic
ESFKVSFLSALEEYTKKLNTQ

SEQ ID NO: 2818 - protein, 10 aa, synthetic construct
  REGION 1..10: note = Synthetic
NLKLLDNWDS

SEQ ID NO: 2819 - protein, 10 aa, synthetic construct
  REGION 1..10: note = Synthetic
DSGRDYVSQF

SEQ ID NO: 2820 - protein, 20 aa, synthetic construct
  REGION 1..20: note = Synthetic
SFKVSFLSALEEYTKKLNTQ

SEQ ID NO: 2821 - protein, 17 aa, synthetic construct
  REGION 1..17: note = Synthetic
VSFLSALEEYTKKLNTQ

SEQ ID NO: 2822 - protein, 10 aa, synthetic construct
  REGION 1..10: note = Synthetic
SKDLEEVKAK

SEQ ID NO: 2823 - protein, 13 aa, synthetic construct
  REGION 1..13: note = Synthetic
SALEEYTKKLNTQ

SEQ ID NO: 2824 - protein, 16 aa, synthetic construct
  REGION 1..16: note = Synthetic
SFLSALEEYTKKLNTQ

SEQ ID NO: 2825 - protein, 10 aa, synthetic construct
  REGION 1..10: note = Synthetic
LATVYVDVLK

SEQ ID NO: 2826 - protein, 10 aa, synthetic construct
  REGION 1..10: note = Synthetic
EKLSPLGEEM

SEQ ID NO: 2827 - protein, 10 aa, synthetic construct
  REGION 1..10: note = Synthetic
EEMRDRARAH

SEQ ID NO: 2828 - protein, 10 aa, synthetic construct
  REGION 1..10: note = Synthetic
VDVLKDSGRD

SEQ ID NO: 2829 - protein, 38 aa, synthetic construct
  REGION 1..38: note = Synthetic
LVETRTIVRFNRPFLMIIVPTDTQNIFFMSKVTNPKQA

SEQ ID NO: 2830 - protein, 40 aa, synthetic construct
  REGION 1..40: note = Synthetic
SALVETRTIVRFNRPFLMIIVPTDTQNIFFMSKVTNPKQA

SEQ ID NO: 2831 - protein, 37 aa, synthetic construct
  REGION 1..37: note = Synthetic
VETRTIVRFNRPFLMIIVPTDTQNIFFMSKVTNPKQA

SEQ ID NO: 2832 - protein, 35 aa, synthetic construct
  REGION 1..35: note = Synthetic
TRTIVRFNRPFLMIIVPTDTQNIFFMSKVTNPKQA

SEQ ID NO: 2833 - protein, 16 aa, synthetic construct
  REGION 1..16: note = Synthetic
TQNIFFMSKVTNPKQA

SEQ ID NO: 2834 - protein, 39 aa, synthetic construct
  REGION 1..39: note = Synthetic
ALVETRTIVRFNRPFLMIIVPTDTQNIFFMSKVTNPKQA

SEQ ID NO: 2835 - protein, 10 aa, synthetic construct
  REGION 1..10: note = Synthetic
QENQDRGTHV

SEQ ID NO: 2836 - protein, 22 aa, synthetic construct
  REGION 1..22: note = Synthetic
IIVPTDTQNIFFMSKVTNPKQA

SEQ ID NO: 2837 - protein, 10 aa, synthetic construct
  REGION 1..10: note = Synthetic
SANVDFAFSL

SEQ ID NO: 2838 - protein, 10 aa, synthetic construct
  REGION 1..10: note = Synthetic
KRHSQGTFTS

SEQ ID NO: 2839 - protein, 10 aa, synthetic construct
  REGION 1..10: note = Synthetic
DKRHSQGTFT

SEQ ID NO: 2840 - protein, 10 aa, synthetic construct
  REGION 1..10: note = Synthetic
KRHSQGTFTS

SEQ ID NO: 2841 - protein, 10 aa, synthetic construct
  REGION 1..10: note = Synthetic
KRHSQGTFTS

SEQ ID NO: 2842 - protein, 10 aa, synthetic construct
  REGION 1..10: note = Synthetic
FVQWLMNTKR

SEQ ID NO: 2843 - protein, 10 aa, synthetic construct
  REGION 1..10: note = Synthetic
DKRHSQGTFT

SEQ ID NO: 2844 - protein, 10 aa, synthetic construct
  REGION 1..10: note = Synthetic
KRNRNNIAKR

SEQ ID NO: 2845 - protein, 10 aa, synthetic construct
  REGION 1..10: note = Synthetic
KRHSQGTFTS

SEQ ID NO: 2846 - protein, 10 aa, synthetic construct
  REGION 1..10: note = Synthetic
DKRHSQGTFT

SEQ ID NO: 2847 - protein, 10 aa, synthetic construct
  REGION 1..10: note = Synthetic
RRDFPEEVAI

SEQ ID NO: 2848 - protein, 10 aa, synthetic construct
  REGION 1..10: note = Synthetic
RRRRRDTHFP

SEQ ID NO: 2849 - protein, 10 aa, synthetic construct
  REGION 1..10: note = Synthetic
FQRRRRRDTH

SEQ ID NO: 2850 - protein, 10 aa, synthetic construct
  REGION 1..10: note = Synthetic
MFQRRRRRDT

SEQ ID NO: 2851 - protein, 10 aa, synthetic construct
  REGION 1..10: note = Synthetic
SWMPMFQRRR

SEQ ID NO: 2852 - protein, 10 aa, synthetic construct
  REGION 1..10: note = Synthetic
WMPMFQRRRR

SEQ ID NO: 2853 - protein, 10 aa, synthetic construct
  REGION 1..10: note = Synthetic
RASWMPMFQR

SEQ ID NO: 2854 - protein, 10 aa, synthetic construct
  REGION 1..10: note = Synthetic
WMPMFQRRRR

SEQ ID NO: 2855 - protein, 10 aa, synthetic construct
  REGION 1..10: note = Synthetic
WMPMFQRRRR

SEQ ID NO: 2856 - protein, 10 aa, synthetic construct
  REGION 1..10: note = Synthetic
RASWMPMFQR

SEQ ID NO: 2857 - protein, 10 aa, synthetic construct
  REGION 1..10: note = Synthetic
LQPQDRAGAR

SEQ ID NO: 2858 - protein, 10 aa, synthetic construct
  REGION 1..10: note = Synthetic
ASWMPMFQRR

SEQ ID NO: 2859 - protein, 10 aa, synthetic construct
  REGION 1..10: note = Synthetic
QDRAGARASW

SEQ ID NO: 2860 - protein, 37 aa, synthetic construct
  REGION 1..37: note = Synthetic
LTGRGAEDSLADQAANKWGRSGRDPNHFRPAGLPEKY

SEQ ID NO: 2861 - protein, 36 aa, synthetic construct
  REGION 1..36: note = Synthetic
TGRGAEDSLADQAANKWGRSGRDPNHFRPAGLPEKY

SEQ ID NO: 2862 - protein, 14 aa, synthetic construct
  REGION 1..14: note = Synthetic
DPNHFRPAGLPEKY

SEQ ID NO: 2863 - protein, 35 aa, synthetic construct
  REGION 1..35: note = Synthetic
GRGAEDSLADQAANKWGRSGRDPNHFRPAGLPEKY

SEQ ID NO: 2864 - protein, 10 aa, synthetic construct
  REGION 1..10: note = Synthetic
FRPAGLPEKY

SEQ ID NO: 2865 - protein, 10 aa, synthetic construct
  REGION 1..10: note = Synthetic
FRPAGLPEKY

SEQ ID NO: 2866 - protein, 29 aa, synthetic construct
  REGION 1..29: note = Synthetic
SLADQAANKWGRSGRDPNHFRPAGLPEKY

SEQ ID NO: 2867 - protein, 34 aa, synthetic construct
  REGION 1..34: note = Synthetic
RGAEDSLADQAANKWGRSGRDPNHFRPAGLPEKY

SEQ ID NO: 2868 - protein, 10 aa, synthetic construct
  REGION 1..10: note = Synthetic
FRPAGLPEKY

SEQ ID NO: 2869 - protein, 10 aa, synthetic construct
  REGION 1..10: note = Synthetic
SNARENIQRL

SEQ ID NO: 2870 - protein, 50 aa, synthetic construct
  REGION 1..50: note = Synthetic
AEVISNARENIQRLTGRGAEDSLADQAANKWGRSGRDPNHFRPAGLPEKY

SEQ ID NO: 2871 - protein, 26 aa, synthetic construct
  REGION 1..26: note = Synthetic
DQAANKWGRSGRDPNHFRPAGLPEKY

SEQ ID NO: 2872 - protein, 49 aa, synthetic construct
  REGION 1..49: note = Synthetic
EVISNARENIQRLTGRGAEDSLADQAANKWGRSGRDPNHFRPAGLPEKY

SEQ ID NO: 2873 - protein, 10 aa, synthetic construct
  REGION 1..10: note = Synthetic
KKTETQEKNP

SEQ ID NO: 2874 - protein, 10 aa, synthetic construct
  REGION 1..10: note = Synthetic
TQEKNPLPSK

SEQ ID NO: 2875 - protein, 21 aa, synthetic construct
  REGION 1..21: note = Synthetic
QEKNPLPSKETIEQEKQAGES

SEQ ID NO: 2876 - protein, 43 aa, synthetic construct
  REGION 1..43: note = Synthetic
SDKPDMAEIEKFDKSKLKKTETQEKNPLPSKETIEQEKQAGES

SEQ ID NO: 2877 - protein, 10 aa, synthetic construct
  REGION 1..10: note = Synthetic
KNPLPSKETI

SEQ ID NO: 2878 - protein, 22 aa, synthetic construct
  REGION 1..22: note = Synthetic
TQEKNPLPSKETIEQEKQAGES

SEQ ID NO: 2879 - protein, 19 aa, synthetic construct
  REGION 1..19: note = Synthetic
KNPLPSKETIEQEKQAGES

SEQ ID NO: 2880 - protein, 24 aa, synthetic construct
  REGION 1..24: note = Synthetic
TETQEKNPLPSKETIEQEKQAGES

SEQ ID NO: 2881 - protein, 20 aa, synthetic construct
  REGION 1..20: note = Synthetic
EKNPLPSKETIEQEKQAGES

SEQ ID NO: 2882 - protein, 18 aa, synthetic construct
  REGION 1..18: note = Synthetic
NPLPSKETIEQEKQAGES

SEQ ID NO: 2883 - protein, 10 aa, synthetic construct
  REGION 1..10: note = Synthetic
HNLTTGATLI

SEQ ID NO: 2884 - protein, 10 aa, synthetic construct
  REGION 1..10: note = Synthetic
NLTTGATLIN

SEQ ID NO: 2885 - protein, 16 aa, synthetic construct
  REGION 1..16: note = Synthetic
KVTSIQDWVQKTIAEN

SEQ ID NO: 2886 - protein, 10 aa, synthetic construct
  REGION 1..10: note = Synthetic
SHHNLTTGAT

SEQ ID NO: 2887 - protein, 10 aa, synthetic construct
  REGION 1..10: note = Synthetic
AKMVSHHNLT

SEQ ID NO: 2888 - protein, 10 aa, synthetic construct
  REGION 1..10: note = Synthetic
LFAVDSGNDV

SEQ ID NO: 2889 - protein, 10 aa, synthetic construct
  REGION 1..10: note = Synthetic
LFAVDSGNDV

SEQ ID NO: 2890 - protein, 35 aa, synthetic construct
  REGION 1..35: note = Synthetic
VTLAAHLPAEFTPAVHASLDKFLASVSTVLTSKYR

SEQ ID NO: 2891 - protein, 33 aa, synthetic construct
  REGION 1..33: note = Synthetic
LAAHLPAEFTPAVHASLDKFLASVSTVLTSKYR

SEQ ID NO: 2892 - protein, 10 aa, synthetic construct
  REGION 1..10: note = Synthetic
FLSFPTTKTY

SEQ ID NO: 2893 - protein, 10 aa, synthetic construct
  REGION 1..10: note = Synthetic
LSFPTTKTYF

SEQ ID NO: 2894 - protein, 15 aa, synthetic construct
  REGION 1..15: note = Synthetic
KFLASVSTVLTSKYR

SEQ ID NO: 2895 - protein, 32 aa, synthetic construct
  REGION 1..32: note = Synthetic
AAHLPAEFTPAVHASLDKFLASVSTVLTSKYR

SEQ ID NO: 2896 - protein, 10 aa, synthetic construct
  REGION 1..10: note = Synthetic
PTTKTYFPHF

SEQ ID NO: 2897 - protein, 10 aa, synthetic construct
  REGION 1..10: note = Synthetic
AHAGEYGAEA

SEQ ID NO: 2898 - protein, 31 aa, synthetic construct
  REGION 1..31: note = Synthetic
YEGSYALTSEEAERSDGDPVQPAVLQVHQTS

SEQ ID NO: 2899 - protein, 10 aa, synthetic construct
  REGION 1..10: note = Synthetic
QEKPSSPSPM

SEQ ID NO: 2900 - protein, 26 aa, synthetic construct
  REGION 1..26: note = Synthetic
ALTSEEAERSDGDPVQPAVLQVHQTS

SEQ ID NO: 2901 - protein, 10 aa, synthetic construct
  REGION 1..10: note = Synthetic
SDMRQEKPSS

SEQ ID NO: 2902 - protein, 10 aa, synthetic construct
  REGION 1..10: note = Synthetic
RQEKPSSPSP

SEQ ID NO: 2903 - protein, 28 aa, synthetic construct
  REGION 1..28: note = Synthetic
SYALTSEEAERSDGDPVQPAVLQVHQTS

SEQ ID NO: 2904 - protein, 10 aa, synthetic construct
  REGION 1..10: note = Synthetic
AAPPGHQLHR

SEQ ID NO: 2905 - protein, 27 aa, synthetic construct
  REGION 1..27: note = Synthetic
TVVQPSVGAAAGPVVPPCPGRIRHFKV

SEQ ID NO: 2906 - protein, 10 aa, synthetic construct
  REGION 1..10: note = Synthetic
APPGHQLHRA

SEQ ID NO: 2907 - protein, 10 aa, synthetic construct
  REGION 1..10: note = Synthetic
RTVVQPSVGA

SEQ ID NO: 2908 - protein, 10 aa, synthetic construct
  REGION 1..10: note = Synthetic
RTVVQPSVGA

SEQ ID NO: 2909 - protein, 10 aa, synthetic construct
  REGION 1..10: note = Synthetic
RTVVQPSVGA

SEQ ID NO: 2910 - protein, 10 aa, synthetic construct
  REGION 1..10: note = Synthetic
LAAPPGHQLH

SEQ ID NO: 2911 - protein, 10 aa, synthetic construct
  REGION 1..10: note = Synthetic
KTRTVVQPSV

SEQ ID NO: 2912 - protein, 10 aa, synthetic construct
  REGION 1..10: note = Synthetic
EKREDSKEAE

SEQ ID NO: 2913 - protein, 10 aa, synthetic construct
  REGION 1..10: note = Synthetic
KREDSKEAEK

SEQ ID NO: 2914 - protein, 10 aa, synthetic construct
  REGION 1..10: note = Synthetic
EKREDSKEAE

SEQ ID NO: 2915 - protein, 10 aa, synthetic construct
  REGION 1..10: note = Synthetic
RRGWRPSSRE

SEQ ID NO: 2916 - protein, 10 aa, synthetic construct
  REGION 1..10: note = Synthetic
RARAYGFRGP

SEQ ID NO: 2917 - protein, 10 aa, synthetic construct
  REGION 1..10: note = Synthetic
SEETKENEGF

SEQ ID NO: 2918 - protein, 10 aa, synthetic construct
  REGION 1..10: note = Synthetic
RSEETKENEG

SEQ ID NO: 2919 - protein, 10 aa, synthetic construct
  REGION 1..10: note = Synthetic
RSEETKENEG

SEQ ID NO: 2920 - protein, 10 aa, synthetic construct
  REGION 1..10: note = Synthetic
RSEETKENEG

SEQ ID NO: 2921 - protein, 10 aa, synthetic construct
  REGION 1..10: note = Synthetic
GDVPVTVTVH

SEQ ID NO: 2922 - protein, 10 aa, synthetic construct
  REGION 1..10: note = Synthetic
RSEETKENEG

SEQ ID NO: 2923 - protein, 10 aa, synthetic construct
  REGION 1..10: note = Synthetic
RSEETKENEG

SEQ ID NO: 2924 - protein, 10 aa, synthetic construct
  REGION 1..10: note = Synthetic
RSEETKENEG

SEQ ID NO: 2925 - protein, 10 aa, synthetic construct
  REGION 1..10: note = Synthetic
RSEETKENEG

SEQ ID NO: 2926 - protein, 10 aa, synthetic construct
  REGION 1..10: note = Synthetic
KKQRFRHRNR

SEQ ID NO: 2927 - protein, 10 aa, synthetic construct
  REGION 1..10: note = Synthetic
GMAPRPSLAK

SEQ ID NO: 2928 - protein, 10 aa, synthetic construct
  REGION 1..10: note = Synthetic
IDSRPETLHP

SEQ ID NO: 2929 - protein, 10 aa, synthetic construct
  REGION 1..10: note = Synthetic
KKQRFRHRNR

SEQ ID NO: 2930 - protein, 10 aa, synthetic construct
  REGION 1..10: note = Synthetic
SLAKKQRFRH

SEQ ID NO: 2931 - protein, 10 aa, synthetic construct
  REGION 1..10: note = Synthetic
KKQRFRHRNR

SEQ ID NO: 2932 - protein, 10 aa, synthetic construct
  REGION 1..10: note = Synthetic
LAKKQRFRHR

SEQ ID NO: 2933 - protein, 10 aa, synthetic construct
  REGION 1..10: note = Synthetic
DEFPGIPSPL

SEQ ID NO: 2934 - protein, 10 aa, synthetic construct
  REGION 1..10: note = Synthetic
KEKGYPKLLQ

SEQ ID NO: 2935 - protein, 10 aa, synthetic construct
  REGION 1..10: note = Synthetic
KGYPKLLQDE

SEQ ID NO: 2936 - protein, 10 aa, synthetic construct
  REGION 1..10: note = Synthetic
SVFLIKGDKV

SEQ ID NO: 2937 - protein, 10 aa, synthetic construct
  REGION 1..10: note = Synthetic
KKEKGYPKLL

SEQ ID NO: 2938 - protein, 10 aa, synthetic construct
  REGION 1..10: note = Synthetic
DEFPGIPSPL

SEQ ID NO: 2939 - protein, 10 aa, synthetic construct
  REGION 1..10: note = Synthetic
QPVSLANTQP

SEQ ID NO: 2940 - protein, 10 aa, synthetic construct
  REGION 1..10: note = Synthetic
KFSPGAPGGS

SEQ ID NO: 2941 - protein, 10 aa, synthetic construct
  REGION 1..10: note = Synthetic
SQTQPVSLAN

SEQ ID NO: 2942 - protein, 10 aa, synthetic construct
  REGION 1..10: note = Synthetic
YAPQKKFGPV

SEQ ID NO: 2943 - protein, 10 aa, synthetic construct
  REGION 1..10: note = Synthetic
LANTQPRGPP

SEQ ID NO: 2944 - protein, 10 aa, synthetic construct
  REGION 1..10: note = Synthetic
MGRVGEIPPP

SEQ ID NO: 2945 - protein, 10 aa, synthetic construct
  REGION 1..10: note = Synthetic
ALSSVQESQV

SEQ ID NO: 2946 - protein, 10 aa, synthetic construct
  REGION 1..10: note = Synthetic
KDALSSVQES

SEQ ID NO: 2947 - protein, 15 aa, synthetic construct
  REGION 1..15: note = Synthetic
WDLDPEVRPTSAVAA

SEQ ID NO: 2948 - protein, 10 aa, synthetic construct
  REGION 1..10: note = Synthetic
RGWVTDGFSS

SEQ ID NO: 2949 - protein, 11 aa, synthetic construct
  REGION 1..11: note = Synthetic
PEVRPTSAVAA

SEQ ID NO: 2950 - protein, 7 aa, synthetic construct
  REGION 1..7: note = Synthetic
KRAMENM

SEQ ID NO: 2951 - protein, 7 aa, synthetic construct
  REGION 1..7: note = Synthetic
KRAMENM

SEQ ID NO: 2952 - protein, 9 aa, synthetic construct
  REGION 1..9: note = Synthetic
IAKRAMENM

SEQ ID NO: 2953 - protein, 10 aa, synthetic construct
  REGION 1..10: note = Synthetic
KRFPVGPPKN

SEQ ID NO: 2954 - protein, 10 aa, synthetic construct
  REGION 1..10: note = Synthetic
KRFPVGPPKN

SEQ ID NO: 2955 - protein, 10 aa, synthetic construct
  REGION 1..10: note = Synthetic
VEDILNLLGM

SEQ ID NO: 2956 - protein, 10 aa, synthetic construct
  REGION 1..10: note = Synthetic
ENSRDNPFKR

SEQ ID NO: 2957 - protein, 38 aa, synthetic construct
  REGION 1..38: note = Synthetic
KPEVLEVTLNRPFLFAVYDQSATALHFLGRVANPLSTA

SEQ ID NO: 2958 - protein, 44 aa, synthetic construct
  REGION 1..44: note = Synthetic
STQQLNKPEVLEVTLNRPFLFAVYDQSATALHFLGRVANPLSTA

SEQ ID NO: 2959 - protein, 42 aa, synthetic construct
  REGION 1..42: note = Synthetic
QQLNKPEVLEVTLNRPFLFAVYDQSATALHFLGRVANPLSTA

SEQ ID NO: 2960 - protein, 10 aa, synthetic construct
  REGION 1..10: note = Synthetic
APLTKPLKAF

SEQ ID NO: 2961 - protein, 10 aa, synthetic construct
  REGION 1..10: note = Synthetic
KPLKAFTVCL

SEQ ID NO: 2962 - protein, 10 aa, synthetic construct
  REGION 1..10: note = Synthetic
LKAPLTKPLK

SEQ ID NO: 2963 - protein, 10 aa, synthetic construct
  REGION 1..10: note = Synthetic
QCPFEDHVKL

SEQ ID NO: 2964 - protein, 10 aa, synthetic construct
  REGION 1..10: note = Synthetic
ALVLIAFAQY

SEQ ID NO: 2965 - protein, 10 aa, synthetic construct
  REGION 1..10: note = Synthetic
IAFAQYLQQC

SEQ ID NO: 2966 - protein, 21 aa, synthetic construct
  REGION 1..21: note = Synthetic
GTNRGASQAGMTGYGMPRQIL

SEQ ID NO: 2967 - protein, 22 aa, synthetic construct
  REGION 1..22: note = Synthetic
MGTNRGASQAGMTGYGMPRQIL

SEQ ID NO: 2968 - protein, 10 aa, synthetic construct
  REGION 1..10: note = Synthetic
TGYGMPRQIL

SEQ ID NO: 2969 - protein, 7 aa, synthetic construct
  REGION 1..7: note = Synthetic
ELSPLDL

SEQ ID NO: 2970 - protein, 10 aa, synthetic construct
  REGION 1..10: note = Synthetic
INMLTRPRYG

SEQ ID NO: 2971 - protein, 10 aa, synthetic construct
  REGION 1..10: note = Synthetic
GKRHKEDTLA

SEQ ID NO: 2972 - protein, 10 aa, synthetic construct
  REGION 1..10: note = Synthetic
GKRHKEDTLA

SEQ ID NO: 2973 - protein, 10 aa, synthetic construct
  REGION 1..10: note = Synthetic
RNSEPQDEGE

SEQ ID NO: 2974 - protein, 10 aa, synthetic construct
  REGION 1..10: note = Synthetic
RGARNSEPQD

SEQ ID NO: 2975 - protein, 10 aa, synthetic construct
  REGION 1..10: note = Synthetic
RNSEPQDEGE

SEQ ID NO: 2976 - protein, 10 aa, synthetic construct
  REGION 1..10: note = Synthetic
RSPQPPPPAP

SEQ ID NO: 2977 - protein, 10 aa, synthetic construct
  REGION 1..10: note = Synthetic
RSPQPPPPAP

SEQ ID NO: 2978 - protein, 10 aa, synthetic construct
  REGION 1..10: note = Synthetic
RGARNSEPQD

SEQ ID NO: 2979 - protein, 10 aa, synthetic construct
  REGION 1..10: note = Synthetic
VRSQTHSLPA

SEQ ID NO: 2980 - protein, 10 aa, synthetic construct
  REGION 1..10: note = Synthetic
WNEVLPPWDR

SEQ ID NO: 2981 - protein, 10 aa, synthetic construct
  REGION 1..10: note = Synthetic
SDHGEKKLIS

SEQ ID NO: 2982 - protein, 10 aa, synthetic construct
  REGION 1..10: note = Synthetic
NNPAGLYSSE

SEQ ID NO: 2983 - protein, 10 aa, synthetic construct
  REGION 1..10: note = Synthetic
KVAASIGNAQ

SEQ ID NO: 2984 - protein, 10 aa, synthetic construct
  REGION 1..10: note = Synthetic
ANSRPLDHAQ

SEQ ID NO: 2985 - protein, 10 aa, synthetic construct
  REGION 1..10: note = Synthetic
LSVAEITNAC

SEQ ID NO: 2986 - protein, 10 aa, synthetic construct
  REGION 1..10: note = Synthetic
SVAEITNACF

SEQ ID NO: 2987 - protein, 10 aa, synthetic construct
  REGION 1..10: note = Synthetic
ACFEPANQMV

SEQ ID NO: 2988 - protein, 10 aa, synthetic construct
  REGION 1..10: note = Synthetic
LVVYPWTQRF

SEQ ID NO: 2989 - protein, 10 aa, synthetic construct
  REGION 1..10: note = Synthetic
FESFGDLSTP

SEQ ID NO: 2990 - protein, 10 aa, synthetic construct
  REGION 1..10: note = Synthetic
FESFGDLSTP

SEQ ID NO: 2991 - protein, 10 aa, synthetic construct
  REGION 1..10: note = Synthetic
ETYLSRGDSS

SEQ ID NO: 2992 - protein, 10 aa, synthetic construct
  REGION 1..10: note = Synthetic
ETYLSRGDSS

SEQ ID NO: 2993 - protein, 10 aa, synthetic construct
  REGION 1..10: note = Synthetic
RETYLSRGDS

SEQ ID NO: 2994 - protein, 10 aa, synthetic construct
  REGION 1..10: note = Synthetic
ETYLSRGDSS

SEQ ID NO: 2995 - protein, 10 aa, synthetic construct
  REGION 1..10: note = Synthetic
RSLPGESEEM

SEQ ID NO: 2996 - protein, 10 aa, synthetic construct
  REGION 1..10: note = Synthetic
DAPPQDPSCC

SEQ ID NO: 2997 - protein, 10 aa, synthetic construct
  REGION 1..10: note = Synthetic
SRKNPKFMET

SEQ ID NO: 2998 - protein, 20 aa, synthetic construct
  REGION 1..20: note = Synthetic
FMETVAEKALQEYRKKHREE

SEQ ID NO: 2999 - protein, 57 aa, synthetic construct
  REGION 1..57: note = Synthetic
TPDVSSALDKLKEFGNTLEDKARELISRIKQSELSAKMREWFSETFQKVKEKLKIDS

SEQ ID NO: 3000 - protein, 55 aa, synthetic construct
  REGION 1..55: note = Synthetic
DVSSALDKLKEFGNTLEDKARELISRIKQSELSAKMREWFSETFQKVKEKLKIDS

SEQ ID NO: 3001 - protein, 10 aa, synthetic construct
  REGION 1..10: note = Synthetic
SRKMLEEIMK

SEQ ID NO: 3002 - protein, 10 aa, synthetic construct
  REGION 1..10: note = Synthetic
TQSAIPYALR

SEQ ID NO: 3003 - protein, 18 aa, synthetic construct
  REGION 1..18: note = Synthetic
IGEGQQHHLGGAKQAGDV

SEQ ID NO: 3004 - protein, 13 aa, synthetic construct
  REGION 1..13: note = Synthetic
EPPPRTLPATDLQ

SEQ ID NO: 3005 - protein, 12 aa, synthetic construct
  REGION 1..12: note = Synthetic
PPPRTLPATDLQ

SEQ ID NO: 3006 - protein, 10 aa, synthetic construct
  REGION 1..10: note = Synthetic
VAPGQTARIT

SEQ ID NO: 3007 - protein, 10 aa, synthetic construct
  REGION 1..10: note = Synthetic
VAPGQTARIT

SEQ ID NO: 3008 - protein, 10 aa, synthetic construct
  REGION 1..10: note = Synthetic
RKSAGAAKRK

SEQ ID NO: 3009 - protein, 10 aa, synthetic construct
  REGION 1..10: note = Synthetic
KKKARKSAGA

SEQ ID NO: 3010 - protein, 10 aa, synthetic construct
  REGION 1..10: note = Synthetic
KKARKSAGAA

SEQ ID NO: 3011 - protein, 10 aa, synthetic construct
  REGION 1..10: note = Synthetic
QLDARNTKVL

SEQ ID NO: 3012 - protein, 10 aa, synthetic construct
  REGION 1..10: note = Synthetic
RNTKVLTFIS

SEQ ID NO: 3013 - protein, 10 aa, synthetic construct
  REGION 1..10: note = Synthetic
VSPGQTARIT

SEQ ID NO: 3014 - protein, 10 aa, synthetic construct
  REGION 1..10: note = Synthetic
VSPGQTASIT

SEQ ID NO: 3015 - protein, 10 aa, synthetic construct
  REGION 1..10: note = Synthetic
AAPGQKVTIS

SEQ ID NO: 3016 - protein, 10 aa, synthetic construct
  REGION 1..10: note = Synthetic
AAPGQKVTIS

SEQ ID NO: 3017 - protein, 10 aa, synthetic construct
  REGION 1..10: note = Synthetic
EAPRQRVTIS

SEQ ID NO: 3018 - protein, 10 aa, synthetic construct
  REGION 1..10: note = Synthetic
EAPRQRVTIS

SEQ ID NO: 3019 - protein, 10 aa, synthetic construct
  REGION 1..10: note = Synthetic
VSPGQTASIT

SEQ ID NO: 3020 - protein, 10 aa, synthetic construct
  REGION 1..10: note = Synthetic
SPGFPGEYAN

SEQ ID NO: 3021 - protein, 10 aa, synthetic construct
  REGION 1..10: note = Synthetic
LSPGERATLS

SEQ ID NO: 3022 - protein, 10 aa, synthetic construct
  REGION 1..10: note = Synthetic
LSPGERATLS

SEQ ID NO: 3023 - protein, 10 aa, synthetic construct
  REGION 1..10: note = Synthetic
LGQPASISCR

SEQ ID NO: 3024 - protein, 10 aa, synthetic construct
  REGION 1..10: note = Synthetic
LPVTLGQPAS

SEQ ID NO: 3025 - protein, 10 aa, synthetic construct
  REGION 1..10: note = Synthetic
RLRRGLPALL

SEQ ID NO: 3026 - protein, 10 aa, synthetic construct
  REGION 1..10: note = Synthetic
RRGLPALLRA

SEQ ID NO: 3027 - protein, 10 aa, synthetic construct
  REGION 1..10: note = Synthetic
QAEAKSYFEK

SEQ ID NO: 3028 - protein, 10 aa, synthetic construct
  REGION 1..10: note = Synthetic
LGQPASISFR

SEQ ID NO: 3029 - protein, 10 aa, synthetic construct
  REGION 1..10: note = Synthetic
SPVTLGQPAS

SEQ ID NO: 3030 - protein, 10 aa, synthetic construct
  REGION 1..10: note = Synthetic
TFGSGEADCG

SEQ ID NO: 3031 - protein, 10 aa, synthetic construct
  REGION 1..10: note = Synthetic
TFGSGEADCG

SEQ ID NO: 3032 - protein, 10 aa, synthetic construct
  REGION 1..10: note = Synthetic
RRANTFLEEV

SEQ ID NO: 3033 - protein, 10 aa, synthetic construct
  REGION 1..10: note = Synthetic
RYNSGKLEEF

SEQ ID NO: 3034 - protein, 10 aa, synthetic construct
  REGION 1..10: note = Synthetic
RYNSGKLEEF

SEQ ID NO: 3035 - protein, 10 aa, synthetic construct
  REGION 1..10: note = Synthetic
DWAAGTMDPE

SEQ ID NO: 3036 - protein, 10 aa, synthetic construct
  REGION 1..10: note = Synthetic
LGDWAAGTMD

SEQ ID NO: 3037 - protein, 29 aa, synthetic construct
  REGION 1..29: note = Synthetic
DVGSYQEKVDVVLGPIQLQTPPRREEEPR

SEQ ID NO: 3038 - protein, 10 aa, synthetic construct
  REGION 1..10: note = Synthetic
KREWVKFAKP

SEQ ID NO: 3039 - protein, 10 aa, synthetic construct
  REGION 1..10: note = Synthetic
KREWVKFAKP

SEQ ID NO: 3040 - protein, 10 aa, synthetic construct
  REGION 1..10: note = Synthetic
AVVPSTATVV

SEQ ID NO: 3041 - protein, 10 aa, synthetic construct
  REGION 1..10: note = Synthetic
AVVPSTATVV

SEQ ID NO: 3042 - protein, 10 aa, synthetic construct
  REGION 1..10: note = Synthetic
TTTPSKQSNN

SEQ ID NO: 3043 - protein, 10 aa, synthetic construct
  REGION 1..10: note = Synthetic
LTPEQWKSHK

SEQ ID NO: 3044 - protein, 10 aa, synthetic construct
  REGION 1..10: note = Synthetic
LTPEQWKSHK

SEQ ID NO: 3045 - protein, 10 aa, synthetic construct
  REGION 1..10: note = Synthetic
ASENIVIQVY

SEQ ID NO: 3046 - protein, 10 aa, synthetic construct
  REGION 1..10: note = Synthetic
AAPQSVCALR

SEQ ID NO: 3047 - protein, 10 aa, synthetic construct
  REGION 1..10: note = Synthetic
TETTEKGCVL

SEQ ID NO: 3048 - protein, 10 aa, synthetic construct
  REGION 1..10: note = Synthetic
INNPLAQADW

SEQ ID NO: 3049 - protein, 10 aa, synthetic construct
  REGION 1..10: note = Synthetic
IFAGLAFIVG

SEQ ID NO: 3050 - protein, 10 aa, synthetic construct
  REGION 1..10: note = Synthetic
FYYDYETVRN

SEQ ID NO: 3051 - protein, 10 aa, synthetic construct
  REGION 1..10: note = Synthetic
LPVTPGEPAS

SEQ ID NO: 3052 - protein, 10 aa, synthetic construct
  REGION 1..10: note = Synthetic
PGEPASISCR

SEQ ID NO: 3053 - protein, 26 aa, synthetic construct
  REGION 1..26: note = Synthetic
GAGGEDSAGLQGQTLTGGPIRIDWED

SEQ ID NO: 3054 - protein, 29 aa, synthetic construct
  REGION 1..29: note = Synthetic
HDNLRSLDRNLPSDSQDLGQHGLEEDFML

SEQ ID NO: 3055 - protein, 21 aa, synthetic construct
  REGION 1..21: note = Synthetic
KPGVYTDVAYYLAWIREHTVS

SEQ ID NO: 3056 - protein, 10 aa, synthetic construct
  REGION 1..10: note = Synthetic
GVNLQEFLNV

SEQ ID NO: 3057 - protein, 10 aa, synthetic construct
  REGION 1..10: note = Synthetic
KRGIVEQCCT

SEQ ID NO: 3058 - protein, 16 aa, synthetic construct
  REGION 1..16: note = Synthetic
SGFPQVSMFFTHTFPK

SEQ ID NO: 3059 - protein, 10 aa, synthetic construct
  REGION 1..10: note = Synthetic
LSPGERATLS

SEQ ID NO: 3060 - protein, 10 aa, synthetic construct
  REGION 1..10: note = Synthetic
ASVGDRVTIT

SEQ ID NO: 3061 - protein, 10 aa, synthetic construct
  REGION 1..10: note = Synthetic
EKAHDGGRYY

SEQ ID NO: 3062 - protein, 10 aa, synthetic construct
  REGION 1..10: note = Synthetic
QVRLLQRLKT

SEQ ID NO: 3063 - protein, 10 aa, synthetic construct
  REGION 1..10: note = Synthetic
YSLFREQDAP

SEQ ID NO: 3064 - protein, 10 aa, synthetic construct
  REGION 1..10: note = Synthetic
SYPAAAAAKV

SEQ ID NO: 3065 - protein, 10 aa, synthetic construct
  REGION 1..10: note = Synthetic
LQDPVLVSCD

SEQ ID NO: 3066 - protein, 10 aa, synthetic construct
  REGION 1..10: note = Synthetic
KRRDFTPAEL

SEQ ID NO: 3067 - protein, 10 aa, synthetic construct
  REGION 1..10: note = Synthetic
ESPGKTVTIS

SEQ ID NO: 3068 - protein, 10 aa, synthetic construct
  REGION 1..10: note = Synthetic
ESPGKTVTIS

SEQ ID NO: 3069 - protein, 10 aa, synthetic construct
  REGION 1..10: note = Synthetic
VSPGERATLS

SEQ ID NO: 3070 - protein, 10 aa, synthetic construct
  REGION 1..10: note = Synthetic
SPGYPEPYGK

SEQ ID NO: 3071 - protein, 10 aa, synthetic construct
  REGION 1..10: note = Synthetic
KKAGGTPRKA

SEQ ID NO: 3072 - protein, 10 aa, synthetic construct
  REGION 1..10: note = Synthetic
KPPPQKSLKE

SEQ ID NO: 3073 - protein, 10 aa, synthetic construct
  REGION 1..10: note = Synthetic
RRSFPEPEEP

SEQ ID NO: 3074 - protein, 10 aa, synthetic construct
  REGION 1..10: note = Synthetic
YVHLRPARPT

SEQ ID NO: 3075 - protein, 10 aa, synthetic construct
  REGION 1..10: note = Synthetic
GSPGQSVTIS

SEQ ID NO: 3076 - protein, 10 aa, synthetic construct
  REGION 1..10: note = Synthetic
GSPGQSVTIS

SEQ ID NO: 3077 - protein, 10 aa, synthetic construct
  REGION 1..10: note = Synthetic
QPLVVPWEAS

SEQ ID NO: 3078 - protein, 10 aa, synthetic construct
  REGION 1..10: note = Synthetic
SMPPAQQQIT

SEQ ID NO: 3079 - protein, 10 aa, synthetic construct
  REGION 1..10: note = Synthetic
RADEPQWSLY

SEQ ID NO: 3080 - protein, 10 aa, synthetic construct
  REGION 1..10: note = Synthetic
AADIPEVVVS

SEQ ID NO: 3081 - protein, 10 aa, synthetic construct
  REGION 1..10: note = Synthetic
KPEHFLNENG

SEQ ID NO: 3082 - protein, 10 aa, synthetic construct
  REGION 1..10: note = Synthetic
YAEGTFISDY

SEQ ID NO: 3083 - protein, 10 aa, synthetic construct
  REGION 1..10: note = Synthetic
LSCAASGFTF

SEQ ID NO: 3084 - protein, 10 aa, synthetic construct
  REGION 1..10: note = Synthetic
GSPGQSVTIS

SEQ ID NO: 3085 - protein, 10 aa, synthetic construct
  REGION 1..10: note = Synthetic
PGPMKKDKDQ

SEQ ID NO: 3086 - protein, 10 aa, synthetic construct
  REGION 1..10: note = Synthetic
KVSVDEPGPG

SEQ ID NO: 3087 - protein, 10 aa, synthetic construct
  REGION 1..10: note = Synthetic
RSSRIGEIKE

SEQ ID NO: 3088 - protein, 4 aa, synthetic construct
  REGION 1..4: note = Synthetic
LICS

SEQ ID NO: 3089 - protein, 37 aa, synthetic construct
  REGION 1..37: note = Synthetic
LTFPLDYHLNQPFIFVLRDTDTGALLFIGKILDPRGP

SEQ ID NO: 3090 - protein, 10 aa, synthetic construct
  REGION 1..10: note = Synthetic
KELRNHQPRE

SEQ ID NO: 3091 - protein, 10 aa, synthetic construct
  REGION 1..10: note = Synthetic
VSPGQTARIT

SEQ ID NO: 3092 - protein, 10 aa, synthetic construct
  REGION 1..10: note = Synthetic
NPVYHLNNPI

SEQ ID NO: 3093 - protein, 10 aa, synthetic construct
  REGION 1..10: note = Synthetic
ATLSVHQLVE

SEQ ID NO: 3094 - protein, 10 aa, synthetic construct
  REGION 1..10: note = Synthetic
KRDTGAALLA

SEQ ID NO: 3095 - protein, 10 aa, synthetic construct
  REGION 1..10: note = Synthetic
SLGERATINC

SEQ ID NO: 3096 - protein, 10 aa, synthetic construct
  REGION 1..10: note = Synthetic
SPLFPKPYPN

SEQ ID NO: 3097 - protein, 10 aa, synthetic construct
  REGION 1..10: note = Synthetic
AASAVPASGV

SEQ ID NO: 3098 - protein, 10 aa, synthetic construct
  REGION 1..10: note = Synthetic
VDAKAQVKTE

SEQ ID NO: 3099 - protein, 10 aa, synthetic construct
  REGION 1..10: note = Synthetic
AAPPAAATIS

SEQ ID NO: 3100 - protein, 10 aa, synthetic construct
  REGION 1..10: note = Synthetic
VPKDLPPDTT

SEQ ID NO: 3101 - protein, 10 aa, synthetic construct
  REGION 1..10: note = Synthetic
LLARDFEKNY

SEQ ID NO: 3102 - protein, 10 aa, synthetic construct
  REGION 1..10: note = Synthetic
IKAPKLPGGY

SEQ ID NO: 3103 - protein, 10 aa, synthetic construct
  REGION 1..10: note = Synthetic
GVPGAGVPGV

SEQ ID NO: 3104 - protein, 10 aa, synthetic construct
  REGION 1..10: note = Synthetic
LTGPIGPPGP

SEQ ID NO: 3105 - protein, 10 aa, synthetic construct
  REGION 1..10: note = Synthetic
PGLKGKRGDS

SEQ ID NO: 3106 - protein, 10 aa, synthetic construct
  REGION 1..10: note = Synthetic
ISQDLEKQAA

SEQ ID NO: 3107 - protein, 10 aa, synthetic construct
  REGION 1..10: note = Synthetic
LLQDSVDFSL

SEQ ID NO: 3108 - protein, 10 aa, synthetic construct
  REGION 1..10: note = Synthetic
GLPGTGGPPG

SEQ ID NO: 3109 - protein, 10 aa, synthetic construct
  REGION 1..10: note = Synthetic
ILGHVPGMLL

SEQ ID NO: 3110 - protein, 10 aa, synthetic construct
  REGION 1..10: note = Synthetic
PGDIVFRKGP

SEQ ID NO: 3111 - protein, 11 aa, synthetic construct
  REGION 1..11: note = Synthetic
DTGPGAREKGE

SEQ ID NO: 3112 - protein, 10 aa, synthetic construct
  REGION 1..10: note = Synthetic
GPRVVERHQS

SEQ ID NO: 3113 - protein, 10 aa, synthetic construct
  REGION 1..10: note = Synthetic
GPRVVERHQS

SEQ ID NO: 3114 - protein, 10 aa, synthetic construct
  REGION 1..10: note = Synthetic
QAAAAAKAAK

SEQ ID NO: 3115 - protein, 6 aa, synthetic construct
  REGION 1..6: note = Synthetic
KAFVFP

SEQ ID NO: 3116 - protein, 10 aa, synthetic construct
  REGION 1..10: note = Synthetic
VAAAAKSAAK

SEQ ID NO: 3117 - protein, 10 aa, synthetic construct
  REGION 1..10: note = Synthetic
YRGPEGPQGP

SEQ ID NO: 3118 - protein, 10 aa, synthetic construct
  REGION 1..10: note = Synthetic
HMGREGREGE

SEQ ID NO: 3119 - protein, 10 aa, synthetic construct
  REGION 1..10: note = Synthetic
GLEEELQFSL

SEQ ID NO: 3120 - protein, 10 aa, synthetic construct
  REGION 1..10: note = Synthetic
SEETKENEGF

SEQ ID NO: 3121 - protein, 10 aa, synthetic construct
  REGION 1..10: note = Synthetic
DCDDVLQTHP

SEQ ID NO: 3122 - protein, 10 aa, synthetic construct
  REGION 1..10: note = Synthetic
HILGAAGATD

SEQ ID NO: 3123 - protein, 10 aa, synthetic construct
  REGION 1..10: note = Synthetic
PRGETGDDGR

SEQ ID NO: 3124 - protein, 23 aa, synthetic construct
  REGION 1..23: note = Collagen I Cleaveage Site
GADGSPGKDGVRGLTGPIGPPGP

SEQ ID NO: 3125 - protein, 26 aa, synthetic construct
  REGION 1..26: note = 818-Non Clv
APTTGEAGEAAGATSAGATGPATSGS

SEQ ID NO: 3126 - protein, 26 aa, synthetic construct
  REGION 1..26: note = AMX-818 Cleave Site
GGSAPEAGRSANHTPAGLTGPATSGS

SEQ ID NO: 3127 - protein, 26 aa, synthetic construct
  REGION 1..26: note = AC2566 Cleavage Site
GGSAPEAGRSANHGVRGLTGPATSGS

SEQ ID NO: 3128 - protein, 26 aa, synthetic construct
  REGION 1..26: note = AC2567 Cleavage Site
GGSAPEAGSPGKDGVRGLTGPATSGS

SEQ ID NO: 3129 - protein, 23 aa, synthetic construct
  REGION 1..23: note = E. coli AmE098
MKKNIAFLLASMFVFSIATNAYA

1. A method for assessing a likelihood of a subject being responsive to a therapeutic agent that is activatable by a mammalian protease expressed in said subject having a disease or disorder, the method comprising:
a. determining, in a biological sample from said subject affected by the disease or disorder, a presence or an amount of a proteolytic peptide product produced by action of said mammalian protease, wherein said peptide
i. comprises at least five or six consecutive amino acid residues shown in a sequence set forth in Column V of Table A; or
ii. comprises at least five or six consecutive amino acids shown in a sequence set forth in Column IV of Table A; or
iii. comprises at least five or six consecutive amino acids shown in a sequence set forth in Column VI of Table A; and
b. designating said subject as being likely to respond to said therapeutic agent when said peptide of (i), (ii) or (iii) is present and/or if its amount exceeds a threshold value.

2. The method of claim 1, wherein:
a. said therapeutic agent comprises a peptide substrate having an amino acid sequence that is susceptible to cleavage by said mammalian protease at a scissile bond;
b. said polypeptide of (i), (ii), or (iii) comprises a portion containing at least four, at least five, at least six, at least seven, at least eight, at least nine, or at least ten consecutive amino acid residues of said sequence of the peptide substrate that is either N-terminal or C-terminal side of said scissile bond;
c. said sequence of the peptide substrate is susceptible to cleavage by said mammalian protease at a scissile bond, and wherein said polypeptide of (i), (ii), or (iii) is a cleavage product of a reporter polypeptide comprising a substrate sequence that is susceptible to cleavage by the same mammalian protease at a scissile bond and where said reporter polypeptide comprises a sequence set forth in Column II or III of Table A; and/or
d. said sequence of the peptide substrate is susceptible to cleavage by said mammalian protease at a scissile bond, and wherein said polypeptide of (i), (ii), or (iii) is a cleavage product of a human protein that comprises a portion containing at least five or six consecutive amino acid residues of said peptide substrate sequence that includes the scissile bond;
e. said polypeptide of (i) comprises at least seven, at least eight, at least nine, or at least ten consecutive amino acid residues shown in a sequence set forth in Column V of Table A;
f. said polypeptide of (ii) comprises at least seven, at least eight, at least nine, or at least ten consecutive amino acids shown in a sequence set forth in Column IV of Table A;
g. said polypeptide of (iii) comprises at least seven, at least eight, at least nine, or at least ten consecutive amino acids shown in a sequence set forth in Column VI of Table A; and/or
h. step (a) comprises determining the presence or the amount of any two of (i)-(iii).

3-9. (canceled)

10. The method of claim 1, wherein:
a. said threshold is zero or nominal;
b. said biological sample comprises a serum or plasma sample;
c. said mammalian protease is a serine protease, a cysteine protease, an aspartate protease, a threonine protease, or a metalloproteinase; optionally wherein:
i. said mammalian protease is selected from the group consisting of disintegrin and metalloproteinase domain-containing protein 10 (ADAM10), disintegrin and metalloproteinase domain-containing protein 12 (ADAM12), disintegrin and metalloproteinase domain-containing protein 15 (ADAM15), disintegrin and metalloproteinase domain-containing protein 17 (ADAM17), disintegrin and metalloproteinase domain-containing protein 9 (ADAM9), disintegrin and metalloproteinase with thrombospondin motifs 5 (ADAMTS5), Cathepsin B, Cathepsin D, Cathepsin E, Cathepsin K, cathepsin L, cathepsin S, Fibroblast activation protein alpha, Hepsin, kallikrein-2, kallikrein-4, kallikrein-3, Prostate-specific antigen (PSA), kallikrein-13, Legumain, matrix metallopeptidase 1 (MMP-1), matrix metallopeptidase 10 (MMP-10), matrix metallopeptidase 11 (MMP-11), matrix metallopeptidase 12 (MMP-12), matrix metallopeptidase 13 (MMP-13), matrix metallopeptidase 14 (MMP-14), matrix metallopeptidase 16 (MMP-16), matrix metallopeptidase 2 (MMP-2), matrix metallopeptidase 3 (MMP-3), matrix metallopeptidase 7 (MMP-7), matrix metallopeptidase 8 (MMP-8), matrix metallopeptidase 9 (MMP-9), matrix metallopeptidase 4 (MMP-4), matrix metallopeptidase 5 (MMP-5), matrix metallopeptidase 6 (MMP-6), matrix metallopeptidase 15 (MMP-15), neutrophil elastase, protease activated receptor 2 (PAR2), plasmin, prostasin, PSMA-FOLH1, membrane type serine protease 1 (MT-SP1), matriptase, and u-plasminogen; or
ii. said mammalian protease is selected from the group consisting of matrix metallopeptidase 1 (MMP1), matrix metallopeptidase 2 (MMP2), matrix metallopeptidase 7 (MMP7), matrix metallopeptidase 9 (MMP9), matrix metallopeptidase 11 (MMP11), matrix metallopeptidase 14 (MMP14), urokinase-type plasminogen activator (uPA), legumain, and matriptase.

11-14. (canceled)

15. The method of claim 1, wherein:
a. said mammalian protease is preferentially expressed or activated in a target tissue or cell;
b. said target tissue or cell is a tumor;
c. said target tissue or cell produces or is co-localized with said mammalian protease;
d. said target tissue or cell contains therein or thereon, or is associated within proximity thereto, a reporter polypeptide; and/or
e. said target tissue or cell is characterized by an increased amount or activity of said mammalian protease in proximity to said target tissue or cell as compared to a non-target tissue or cell in said subject.

16-18. (canceled)

19. The method of claim 2, wherein said reporter polypeptide:
a. is a polypeptide selected from the group consisting of coagulation factor, complement component, tubulin, immunoglobulin, apolipoprotein, serum amyloid, insulin, growth factor, fibrinogen, PDZ domain protein, LIM domain protein, c-reactive protein, serum albumin, versican, collagen, elastin, keratin, kininogen-1, alpha-2-antiplasmin, clusterin, biglycan, alpha-1-antitrypsin, transthyretin, alpha-1-antichymotrypsin, glucagon, hepcidin, thymosin beta-4, haptoglobin, hemoglobin subunit alpha, caveolae-associated protein 2, alpha-2-HS-glycoprotein, chromogranin-A, vitronectin, hemopexin, epididymis secretory sperm binding protein, secretogranin-2, angiotensinogen, transgelin-2, pancreatic prohormone, neurosecretory protein VGF, ceruloplasmin, PDZ and LIM domain protein 1, multimerin-1, inter-alpha-trypsin inhibitor heavy chain H2, N-acetylmuramoyl-L-alanine amidase, histone H1.4, adhesion G-protein coupled receptor G6, mannan-binding lectin serine protease 2, prothrombin, deleted in malignant brain tumors 1 protein, desmoglein-3, calsyntenin-1, alpha-2-macroglobulin, myosin-9, sodium/potassium-transporting ATPase subunit gamma, oncoprotein-induced transcript 3 protein, serglycin, histidine-rich glycoprotein, inter-alpha-trypsin inhibitor heavy chain H5, integrin alpha-IIb, membrane-associated progesterone receptor component 1, histone H1.2, rho GDP-dissociation inhibitor 2, zinc-alpha-2-glycoprotein, talin-1, secretogranin-1, neutrophil defensin 3, cytochrome P450 2E1, gastric inhibitory polypeptide, transcription initiation factor TFIID subunit 1, integral membrane protein 2B, pigment epithelium-derived factor, voltage-dependent N-type calcium channel subunit alpha-1B, ras GTPase-activating protein nGAP, type I cytoskeletal 17, sulfhydryl oxidase 1, homeobox protein Hox-B2, transcription factor SOX-10, E3 ubiquitin-protein ligase SIAH2, decorin, secreted protein acidic and rich in cysteine (SPARC), laminin gamma 1 chain, vimentin, and nidogen-1 (NID1);
b. is a polypeptide selected from the group consisting of versican, type II collagen alpha-1 chain, kininogen-1, complement C4-A, complement C4-B, complement C3, alpha-2-antiplasmin, clusterin, biglycan, elastin, fibrinogen alpha chain, alpha-1-antitrypsin, fibrinogen beta chain, type III collagen alpha-1 chain, serum amyloid A-1 protein, transthyretin, apolipoprotein A-I, apolipoprotein A-I Isoform 1, alpha-1-antichymotrypsin, glucagon, hepcidin, serum amyloid A-2 protein, thymosin beta-4, haptoglobin, hemoglobin subunit alpha, caveolae-associated protein 2, alpha-2-HS-glycoprotein, chromogranin-A, vitronectin, hemopexin, epididymis secretory sperm binding protein, zyxin, apolipoprotein secretogranin-2, angiotensinogen, c-reactive protein, serum albumin, transgelin-2, pancreatic prohormone, neurosecretory protein VGF, ceruloplasmin, PDZ and LEVI domain protein 1, tubulin alpha-4A chain, multimerin-1, inter-alpha-trypsin inhibitor heavy chain H2, apolipoprotein C-I, fibrinogen gamma chain, N-acetylmuramoyl-L-alanine amidase, immunoglobulin lambda variable 3-21, histone H1.4, adhesion G-protein coupled receptor G6, immunoglobulin lambda variable 3-25, immunoglobulin lambda variable 1-51, immunoglobulin lambda variable 1-36, mannan-binding lectin serine protease 2, immunoglobulin kappa variable 3-20, immunoglobulin kappa variable 2-30, insulin-like growth factor II, apolipoprotein A-II, probable non-functional immunoglobulin kappa variable 2D-24, prothrombin, coagulation factor IX, apolipoprotein L1, deleted in malignant brain tumors 1 protein, desmoglein-3, calsyntenin-1, immunoglobulin lambda constant 3, complement C5, alpha-2-macroglobulin, myosin-9, sodium/potassium-transporting ATPase subunit gamma, immunoglobulin kappa variable 2-28, oncoprotein-induced transcript 3 protein, serglycin, coagulation factor XII, coagulation factor XIII A chain, insulin, histidine-rich glycoprotein, immunoglobulin kappa variable 3-11, immunoglobulin kappa variable 1-39, collagen alpha-1(I) chain, inter-alpha-trypsin inhibitor heavy chain H5, latent-transforming growth factor beta-binding protein 2, integrin alpha-IIb, membrane-associated progesterone receptor component 1, immunoglobulin lambda variable 6-57, immunoglobulin kappa variable 3-15, complement C1r subcomponent-like protein, histone H1.2, rho GDP-dissociation inhibitor 2, latent-transforming growth factor beta-binding protein 4, collagen alpha-1(XVIII) chain, immunoglobulin lambda variable 2-18, zinc-alpha-2-glycoprotein, talin-1, secretogranin-1, neutrophil defensin 3, cytochrome P450 2E1, gastric inhibitory polypeptide, immunoglobulin heavy variable 3-15, immunoglobulin lambda variable 2-11, transcription initiation factor TFIID subunit 1, collagen alpha-1(VII) chain, integral membrane protein 2B, pigment epithelium-derived factor, voltage-dependent N-type calcium channel subunit alpha-1B, immunoglobulin lambda variable 3-27, ras GTPase-activating protein nGAP, keratin, type I cytoskeletal 17, tubulin beta chain, sulfhydryl oxidase 1, immunoglobulin kappa variable 4-1, complement C1r subcomponent, homeobox protein Hox-B2, transcription factor SOX-10, E3 ubiquitin-protein ligase SIAH2, decorin, SPARC, type I collagen alpha-1 chain, type IV collagen alpha-1 chain, laminin gamma 1 chain, vimentin, type III collagen, type IV collagen alpha-3 chain, type VII collagen alpha-1 chain, type VI collagen alpha-1 chain, type V collagen alpha-1 chain, nidogen-1, and type VI collagen alpha-3 chain; and/or
c. comprises a sequence set forth in Columns II-VI of Table A.

20-22. (canceled)

23. The method of claim 1, wherein said subject is suffering from, or is suspected of suffering from, a disease or condition characterized by an increased expression or activity of said mammalian protease in proximity to a target tissue or cell as compared to a corresponding non-target tissue or cell in said subject; optionally wherein:
a. said disease or condition is a cancer or an inflammatory or autoimmune disease;
b. said disease or condition is selected from the group consisting of carcinoma, Hodgkin's lymphoma, and non-Hodgkin's lymphoma, diffuse large B cell lymphoma, follicular lymphoma, mantle cell lymphoma, blastoma, breast cancer, ER/PR+ breast cancer, Her2+ breast cancer, triple-negative breast cancer, colon cancer, colon cancer with malignant ascites, mucinous tumors, prostate cancer, head and neck cancer, skin cancer, melanoma, genito-urinary tract cancer, ovarian cancer, ovarian cancer with malignant ascites, peritoneal carcinomatosis, uterine serous carcinoma, endometrial cancer, cervix cancer, colorectal, uterine cancer, mesothelioma in the peritoneum, kidney cancer, Wilm's tumor, lung cancer, small-cell lung cancer, non-small cell lung cancer, gastric cancer, stomach cancer, small intestine cancer, liver cancer, hepatocarcinoma, hepatoblastoma, liposarcoma, pancreatic cancer, gall bladder cancer, cancers of the bile duct, esophageal cancer, salivary gland carcinoma, thyroid cancer, epithelial cancer, arrhenoblastoma, adenocarcinoma, sarcoma, and B-cell derived chronic lymphatic leukemia; or
c. wherein said disease or condition is selected from the group consisting of ankylosing spondylitis (AS), arthritis (for example, and not limited to, rheumatoid arthritis (RA), juvenile idiopathic arthritis (JIA), osteoarthritis (OA), psoriatic arthritis (PsA), gout, chronic arthritis), chagas disease, chronic obstructive pulmonary disease (COPD), dermatomyositis, type 1 diabetes, endometriosis, Goodpasture syndrome, Graves' disease, Guillain-Barre syndrome (GBS), Hashimoto's disease, suppurative scab, Kawasaki disease, IgA nephropathy, idiopathic thrombocytopenic purpura, inflammatory bowel disease (IBD) (for example, and not limited to, Crohn's disease (CD), clonal disease, ulcerative colitis, collagen colitis, lymphocytic colitis, ischemic colitis, empty colitis, Behcet's syndrome, infectious colitis, indeterminate colitis, interstitial Cystitis), lupus (for example, and not limited to, systemic lupus erythematosus, discoid lupus, subacute cutaneous lupus erythematosus, cutaneous lupus erythematosus (such as chilblain lupus erythematosus), drug-induced lupus, neonatal lupus, lupus nephritis), mixed connective tissue disease, morphea, multiple sclerosis (MS), severe muscle Force disorder, narcolepsy, neuromuscular angina, pemphigus vulgaris, pernicious anemia, psoriasis, psoriatic arthritis, polymyositis, primary biliary cirrhosis, relapsing polychondritis, schizophrenia, scleroderma, Sjogren's syndrome, systemic stiffness syndrome, temporal arteritis (also known as giant cell arteritis), vasculitis, vitiligo, Wegener's granulomatosis, transplant rejection-associated immune reaction(s) (for example, and not limited to, renal transplant rejection, lung transplant rejection, liver transplant rejection), psoriasis, Wiskott-Aldrich syndrome, autoimmune lymphoproliferative syndrome, myasthenia gravis, inflammatory chronic rhinosinusitis, colitis, celiac disease, Barrett's esophagus, inflammatory gastritis, autoimmune nephritis, autoimmune hepatitis, autoimmune carditis, autoimmune encephalitis, autoimmune mediated hematological disease, asthma, atopic dermatitis, atopy, allergy, allergic rhinitis, scleroderma, bronchitis, pericarditis, the inflammatory disease is, Alzheimer's disease, Parkinson's disease, amyotrophic lateral sclerosis, inflammatory lung disease, inflammatory skin disease, atherosclerosis, myocardial infarction, stroke, gram-positive shock, gram-negative shock, sepsis, septic shock, hemorrhagic shock, anaphylactic shock, systemic inflammatory response syndrome.

24-26. (canceled)

27. The method of claim 1, wherein said therapeutic agent:
a. is an anti-cancer agent;
b. is an activatable therapeutic agent;
c. further comprises a masking moiety (MM); optionally wherein:
i. said masking moiety (MM) is capable of being released from said therapeutic agent upon cleavage of said peptide substrate by said mammalian protease;
ii. said masking moiety (MM) interferes with an interaction of said therapeutic agent, in an uncleaved state, to a target tissue or cell;
iii. a bioactivity of said therapeutic agent is capable of being enhanced upon cleavage of said peptide substrate by said mammalian protease;
iv. said masking moiety is an extended recombinant polypeptide; optionally wherein said extended recombinant polypeptide is characterized in that (i) it comprises at least 100 amino acids; (ii) at least 90% of the amino acid residues of it are selected from glycine (G), alanine (A), serine (S), threonine (T), glutamate (E) and proline (P); and (iii) it comprises at least 4 different types of amino acids selected from G, A, S, T, E, and P.

28-34. (canceled)

35. The method of claim 1:
a. further comprises, assessing if a subject will be responsive to a therapeutic subsequent to (b), by contacting said therapeutic agent with said mammalian protease;
b. wherein (a) comprises detecting said polypeptide of (i), (ii) or (iii) in an immuno-assay; optionally wherein said immuno-assay utilizes an antibody that specifically binds to said polypeptide of (i), (ii) or (iii), or an epitope thereof;
c. wherein (a) comprises detecting said polypeptide of (i), (ii) or (iii) by using a mass spectrometer (MS); and/or
d. further comprises, subsequent to (b), administering to said subject an effective amount of said therapeutic agent based on the designation of step (b).

36-39. (canceled)

40. A method for treating a subject with an activatable therapeutic agent, the method comprising:
(a) identifying said subject as having a likelihood of a response to said activatable therapeutic agent based on identification of a peptide biomarker in a biological sample from said subject, which activatable therapeutic agent comprises a peptide substrate sequence susceptible to cleavage by a mammalian protease at a scissile bond; and
(b) administering said activatable therapeutic agent to said subject based on said identification of said subject in (a);
wherein said peptide biomarker comprises a portion identical to at least four consecutive amino acid residues of said peptide substrate sequence that is either N-terminal or C-terminal of said scissile bond.

41. The method of claim 40, wherein:
a. said peptide biomarker is derived from a reporter polypeptide, which reporter polypeptide comprises a sequence set forth in Columns II-VI of Table A;
b. said peptide biomarker has an amino acid sequence that is identical to a sequence of a reporter polypeptide, which reporter polypeptide comprises a sequence set forth in Columns II-VI of Table A;
c. said peptide substrate sequence contains from six to twenty-five or six to twenty amino acid residues; optionally wherein said peptide substrate sequence contains from seven to twelve amino acid residues;
d. said peptide substrate sequence comprises an amino acid sequence having at most three amino acid substitutions, at most two amino acid substitutions, or at most one amino acid substitution with respect to a sequence set forth in Column II or III of Table A, wherein none of said amino acid substitution is at a position corresponding to an amino acid residue immediately adjacent to a corresponding scissile bond as indicated in Table A; optionally wherein:
i. said peptide substrate sequence comprises an amino acid sequence set forth in Column II or III of Table A; or
ii. said peptide substrate sequence has an amino acid sequence identical to a fragment of a sequence set forth in Column II or III of Table A, wherein said fragment comprises at least four consecutive amino acid residues immediately adjacent to a corresponding scissile bond as indicated in Table A; optionally wherein said fragment contains at least five, at least six, at least seven, at least eight, at least nine, or at least ten amino acid residues
e. said biological sample comprises a serum or plasma sample;
f. said mammalian protease is a serine protease, a cysteine protease, an aspartate protease, a threonine protease, or a metalloproteinase; optionally wherein:
i. said mammalian protease is selected from the group consisting of disintegrin and metalloproteinase domain-containing protein 10 (ADAM10), disintegrin and metalloproteinase domain-containing protein 12 (ADAM12), disintegrin and metalloproteinase domain-containing protein 15 (ADAM15), disintegrin and metalloproteinase domain-containing protein 17 (ADAM17), disintegrin and metalloproteinase domain-containing protein 9 (ADAM9), disintegrin and metalloproteinase with thrombospondin motifs 5 (ADAMTS5), Cathepsin B, Cathepsin D, Cathepsin E, Cathepsin K, cathepsin L, cathepsin S, Fibroblast activation protein alpha, Hepsin, kallikrein-2, kallikrein-4, kallikrein-3, Prostate-specific antigen (PSA), kallikrein-13, Legumain, matrix metallopeptidase 1 (MMP-1), matrix metallopeptidase 10 (MMP-10), matrix metallopeptidase 11 (MMP-11), matrix metallopeptidase 12 (MMP-12), matrix metallopeptidase 13 (MMP-13), matrix metallopeptidase 14 (MMP-14), matrix metallopeptidase 16 (MMP-16), matrix metallopeptidase 2 (MMP-2), matrix metallopeptidase 3 (MMP-3), matrix metallopeptidase 7 (MMP-7), matrix metallopeptidase 8 (MMP-8), matrix metallopeptidase 9 (MMP-9), matrix metallopeptidase 4 (MMP-4), matrix metallopeptidase 5 (MMP-5), matrix metallopeptidase 6 (MMP-6), matrix metallopeptidase 15 (MMP-15), neutrophil elastase, protease activated receptor 2 (PAR2), plasmin, prostasin, PSMA-FOLH1, membrane type serine protease 1 (MT-SP1), matriptase, and u-plasminogen; or
ii. said mammalian protease is selected from the group consisting of matrix metallopeptidase 1 (MMP1), matrix metallopeptidase 2 (MMP2), matrix metallopeptidase 7 (MMP7), matrix metallopeptidase 9 (MMP9), matrix metallopeptidase 11 (MMP11), matrix metallopeptidase 14 (MMP14), urokinase-type plasminogen activator (uPA), legumain, and matriptase;
g. said mammalian protease is preferentially expressed or activated in a target tissue or cell; optionally wherein:
i. said target tissue or cell is a tumor;
ii. said target tissue or cell produces or is co-localized with said mammalian protease;
iii. said target tissue or cell contains therein or thereon, or is associated with in proximity thereto, a reporter polypeptide, optionally wherein said reporter polypeptide is a polypeptide selected from the group consisting of coagulation factor, complement component, tubulin, immunoglobulin, apolipoprotein, serum amyloid, insulin, growth factor, fibrinogen, PDZ domain protein, LIM domain protein, c-reactive protein, serum albumin, versican, collagen, elastin, keratin, kininogen-1, alpha-2-antiplasmin, clusterin, biglycan, alpha-1-antitrypsin, transthyretin, alpha-1-antichymotrypsin, glucagon, hepcidin, thymosin beta-4, haptoglobin, hemoglobin subunit alpha, caveolae-associated protein 2, alpha-2-HS-glycoprotein, chromogranin-A, vitronectin, hemopexin, epididymis secretory sperm binding protein, secretogranin-2, angiotensinogen, transgelin-2, pancreatic prohormone, neurosecretory protein VGF, ceruloplasmin, PDZ and LIM domain protein 1, multimerin-1, inter-alpha-trypsin inhibitor heavy chain H2, N-acetylmuramoyl-L-alanine amidase, histone H1.4, adhesion G-protein coupled receptor G6, mannan-binding lectin serine protease 2, prothrombin, deleted in malignant brain tumors 1 protein, desmoglein-3, calsyntenin-1, alpha-2-macroglobulin, myosin-9, sodium/potassium-transporting ATPase subunit gamma, oncoprotein-induced transcript 3 protein, serglycin, histidine-rich glycoprotein, inter-alpha-trypsin inhibitor heavy chain H5, integrin alpha-IIb, membrane-associated progesterone receptor component 1, histone H1.2, rho GDP-dissociation inhibitor 2, zinc-alpha-2-glycoprotein, talin-1, secretogranin-1, neutrophil defensin 3, cytochrome P450 2E1, gastric inhibitory polypeptide, transcription initiation factor TFIID subunit 1, integral membrane protein 2B, pigment epithelium-derived factor, voltage-dependent N-type calcium channel subunit alpha-1B, ras GTPase-activating protein nGAP, type I cytoskeletal 17, sulfhydryl oxidase 1, homeobox protein Hox-B2, transcription factor SOX-10, E3 ubiquitin-protein ligase SIAH2, decorin, secreted protein acidic and rich in cysteine (SPARC), laminin gamma 1 chain, vimentin, and nidogen-1 (NID1), or versican, type II collagen alpha-1 chain, kininogen-1, complement C4-A, complement C4-B, complement C3, alpha-2-antiplasmin, clusterin, biglycan, elastin, fibrinogen alpha chain, alpha-1-antitrypsin, fibrinogen beta chain, type III collagen alpha-1 chain, serum amyloid A-1 protein, transthyretin, apolipoprotein A-I, apolipoprotein A-I Isoform 1, alpha-1-antichymotrypsin, glucagon, hepcidin, serum amyloid A-2 protein, thymosin beta-4, haptoglobin, hemoglobin subunit alpha, caveolae-associated protein 2, alpha-2-HS-glycoprotein, chromogranin-A, vitronectin, hemopexin, epididymis secretory sperm binding protein, zyxin, apolipoprotein secretogranin-2, angiotensinogen, c-reactive protein, serum albumin, transgelin-2, pancreatic prohormone, neurosecretory protein VGF, ceruloplasmin, PDZ and LIM domain protein 1, tubulin alpha-4A chain, multimerin-1, inter-alpha-trypsin inhibitor heavy chain H2, apolipoprotein C-I, fibrinogen gamma chain, N-acetylmuramoyl-L-alanine amidase, immunoglobulin lambda variable 3-21, histone H1.4, adhesion G-protein coupled receptor G6, immunoglobulin lambda variable 3-25, immunoglobulin lambda variable 1-51, immunoglobulin lambda variable 1-36, mannan-binding lectin serine protease 2, immunoglobulin kappa variable 3-20, immunoglobulin kappa variable 2-30, insulin-like growth factor II, apolipoprotein A-II, probable non-functional immunoglobulin kappa variable 2D-24, prothrombin, coagulation factor IX, apolipoprotein L1, deleted in malignant brain tumors 1 protein, desmoglein-3, calsyntenin-1, immunoglobulin lambda constant 3, complement C5, alpha-2-macroglobulin, myosin-9, sodium/potassium-transporting ATPase subunit gamma, immunoglobulin kappa variable 2-28, oncoprotein-induced transcript 3 protein, serglycin, coagulation factor XII, coagulation factor XIII A chain, insulin, histidine-rich glycoprotein, immunoglobulin kappa variable 3-11, immunoglobulin kappa variable 1-39, collagen alpha-1(I) chain, inter-alpha-trypsin inhibitor heavy chain H5, latent-transforming growth factor beta-binding protein 2, integrin alpha-IIb, membrane-associated progesterone receptor component 1, immunoglobulin lambda variable 6-57, immunoglobulin kappa variable 3-15, complement C1r subcomponent-like protein, histone H1.2, rho GDP-dissociation inhibitor 2, latent-transforming growth factor beta-binding protein 4, collagen alpha-1(XVIII) chain, immunoglobulin lambda variable 2-18, zinc-alpha-2-glycoprotein, talin-1, secretogranin-1, neutrophil defensin 3, cytochrome P450 2E1, gastric inhibitory polypeptide, immunoglobulin heavy variable 3-15, immunoglobulin lambda variable 2-11, transcription initiation factor TFIID subunit 1, collagen alpha-1(VII) chain, integral membrane protein 2B, pigment epithelium-derived factor, voltage-dependent N-type calcium channel subunit alpha-1B, immunoglobulin lambda variable 3-27, ras GTPase-activating protein nGAP, keratin, type I cytoskeletal 17, tubulin beta chain, sulfhydryl oxidase 1, immunoglobulin kappa variable 4-1, complement C1r subcomponent, homeobox protein Hox-B2, transcription factor SOX-10, E3 ubiquitin-protein ligase SIAH2, decorin, SPARC, type I collagen alpha-1 chain, type IV collagen alpha-1 chain, laminin gamma 1 chain, vimentin, type III collagen, type IV collagen alpha-3 chain, type VII collagen alpha-1 chain, type VI collagen alpha-1 chain, type V collagen alpha-1 chain, nidogen-1, and type VI collagen alpha-3 chain.

42-46. (canceled)

47. The method of claim 41, wherein said peptide substrate sequence susceptible to cleavage by said mammalian protease is susceptible to cleavage by a plurality of mammalian proteases comprising said mammalian protease; optionally wherein:
a. said peptide substrate sequence susceptible to cleavage by said plurality of mammalian proteases has at most three amino acid substitutions, at most two amino acid substitutions, or at most one amino acid substitution with respect to a sequence set forth in Table 1(j), wherein none of said amino acid substitution is at a position corresponding to an amino acid residue immediately adjacent to a corresponding scissile bond; or
b. said peptide substrate sequence susceptible to cleavage by said plurality of mammalian proteases comprises a sequence set forth in Table 1(j).

48-51. (canceled)

52. The method of claim 40, wherein a portion of said peptide substrate sequence:
a. a portion of said peptide substrate sequence that is N-terminal of said scissile bond has at most three amino acid substitutions, at most two amino acid substitutions, or at most one amino acid substitution with respect to a C-terminal end sequence containing from four to ten amino acid residues of a sequence set forth in Column IV or V of Table A, wherein none of said amino acid substitution is at a position corresponding to an amino acid residue immediately adjacent to a corresponding scissile bond; optionally wherein said portion of said peptide substrate sequence that is N-terminal of said scissile bond comprises a C-terminal end sequence containing from four to ten amino acid residues of a sequence set forth in Column IV or V of Table A;
b. a portion of said peptide substrate sequence that is C-terminal of said scissile bond has at most three amino acid substitutions, at most two amino acid substitutions, or at most one amino acid substitution with respect to an N-terminal end sequence containing from four to ten amino acid residues of a sequence set forth in Column V or VI of Table A, wherein none of said amino acid substitution is at a position corresponding to an amino acid residue immediately adjacent to a corresponding scissile bond, optionally wherein said portion of said peptide substrate sequence that is C-terminal of said scissile bond comprises an N-terminal end sequence containing from four to ten amino acid residues of a sequence set forth in Column V or VI of Table A;
c. said likelihood of said response is determined by said method.

53-56. (canceled)

57. A method for treating a subject in need of a therapeutic agent that is activatable by a mammalian protease expressed in said subject, the method comprising:
administering an effective amount of said therapeutic agent to said subject, wherein said subject has been shown to express in a biological sample from said subject:
(i) a polypeptide comprising at least five or six consecutive amino acid residues shown in a sequence set forth in Column V of Table A; or
(ii) a polypeptide comprising at least five or six consecutive amino acids shown in a sequence set forth in Column IV of Table A; or
(iii) a polypeptide comprising at least five or six consecutive amino acids shown in a sequence set forth in Column VI of Table A; or
(iv) expression level of polypeptide (i), (ii) or (iii) exceeds a threshold.

58. The method of claim 57, wherein:
a. said polypeptide sequence of (i) comprises at least seven, at least eight, at least nine, or at least ten consecutive amino acid residues shown in a sequence set forth in Column V of Table A;
b. said polypeptide of (ii) comprises at least seven, at least eight, at least nine, or at least ten consecutive amino acids shown in a sequence set forth in Column IV of Table A;
c. said polypeptide of (iii) comprises at least seven, at least eight, at least nine, or at least ten consecutive amino acids shown in a sequence set forth in Column VI of Table A;
d. said subject has been shown to express in said biological sample any two of (i)-(iii);
e. said therapeutic agent comprises a peptide substance sequence susceptible to cleavage by said mammalian protease;
f. said threshold is zero or nominal; and/or
g. said subject is determined to have a likelihood of a response to a therapeutic agent.

59-62. (canceled)

63. The method of claim 58, wherein:
a. said peptide substrate sequence is susceptible to cleavage by said mammalian protease at a scissile bond, and wherein said polypeptide of (i), (ii), or (iii) comprises a portion containing at least four consecutive amino acid residues of said peptide substrate sequence that is either N-terminal or C-terminal of said scissile bond; optionally wherein
i. a portion of said peptide substrate sequence that is N-terminal of said scissile bond has at most three amino acid substitutions, at most two amino acid substitutions, or at most one amino acid substitution with respect to a C-terminal end sequence containing from four to ten amino acid residues of a sequence set forth in Column IV or V of Table A, wherein none of said amino acid substitution is at a position corresponding to an amino acid residue immediately adjacent to a corresponding scissile bond;
ii. said portion of said peptide substrate sequence that is N-terminal of said scissile bond comprises a C-terminal end sequence containing from four to ten amino acid residues of a sequence set forth in Column IV or V of Table A;
b. a portion of said peptide substrate sequence that is C-terminal of said scissile bond has at most three amino acid substitutions, at most two amino acid substitutions, or at most one amino acid substitution with respect to an N-terminal end sequence containing from four to ten amino acid residues of a sequence set forth in Column V or VI of Table A, wherein none of said amino acid substitution is at a position corresponding to an amino acid residue immediately adjacent to a corresponding scissile bond;
c. said portion of said peptide substrate sequence that is C-terminal of said scissile bond comprises an N-terminal end sequence containing from four to ten amino acid residues of a sequence set forth in Column V or VI of Table A;
d. a portion of said peptide substrate sequence that is C-terminal of said scissile bond has at most three amino acid substitutions, at most two amino acid substitutions, or at most one amino acid substitution with respect to an N-terminal end sequence containing from four to ten amino acid residues of a sequence set forth in Column V or VI of Table A, wherein none of said amino acid substitution is at a position corresponding to an amino acid residue immediately adjacent to a corresponding scissile bond;
e. said portion of said peptide substrate sequence that is C-terminal of said scissile bond comprises an N-terminal end sequence containing from four to ten amino acid residues of a sequence set forth in Column V or VI of Table A.

64-69. (canceled)

70. The method of claim 40, wherein:
a. said mammalian protease is a serine protease, a cysteine protease, an aspartate protease, a threonine protease, or a metalloproteinase; optionally wherein:
i. said mammalian protease is selected from the group consisting of disintegrin and metalloproteinase domain-containing protein 10 (ADAM10), disintegrin and metalloproteinase domain-containing protein 12 (ADAM12), disintegrin and metalloproteinase domain-containing protein 15 (ADAM15), disintegrin and metalloproteinase domain-containing protein 17 (ADAM17), disintegrin and metalloproteinase domain-containing protein 9 (ADAM9), disintegrin and metalloproteinase with thrombospondin motifs 5 (ADAMTS5), Cathepsin B, Cathepsin D, Cathepsin E, Cathepsin K, cathepsin L, cathepsin S, Fibroblast activation protein alpha, Hepsin, kallikrein-2, kallikrein-4, kallikrein-3, Prostate-specific antigen (PSA), kallikrein-13, Legumain, matrix metallopeptidase 1 (MMP-1), matrix metallopeptidase 10 (MMP-10), matrix metallopeptidase 11 (MMP-11), matrix metallopeptidase 12 (MMP-12), matrix metallopeptidase 13 (MMP-13), matrix metallopeptidase 14 (MMP-14), matrix metallopeptidase 16 (MMP-16), matrix metallopeptidase 2 (MMP-2), matrix metallopeptidase 3 (MMP-3), matrix metallopeptidase 7 (MMP-7), matrix metallopeptidase 8 (MMP-8), matrix metallopeptidase 9 (MMP-9), matrix metallopeptidase 4 (MMP-4), matrix metallopeptidase 5 (MMP-5), matrix metallopeptidase 6 (MMP-6), matrix metallopeptidase 15 (MMP-15), neutrophil elastase, protease activated receptor 2 (PAR2), plasmin, prostasin, PSMA-FOLH1, membrane type serine protease 1 (MT-SP1), matriptase, and u-plasminogen; or
ii. said mammalian protease is selected from the group consisting of matrix metallopeptidase 1 (MMP1), matrix metallopeptidase 2 (MMP2), matrix metallopeptidase 7 (MMP7), matrix metallopeptidase 9 (MMP9), matrix metallopeptidase 11 (MMP11), matrix metallopeptidase 14 (MMP14), urokinase-type plasminogen activator (uPA), legumain, and matriptase;
b. said mammalian protease is preferentially expressed or activated in a target tissue or cell; optionally wherein:
i. said target tissue or cell is a tumor;
ii. said target tissue or cell produces or is co-localized with said mammalian protease;
iii. said target tissue or cell contains therein or thereon, or is associated with in proximity thereto, a reporter polypeptide; optionally wherein: said reporter polypeptide is a polypeptide selected from the group consisting of coagulation factor, complement component, tubulin, immunoglobulin, apolipoprotein, serum amyloid, insulin, growth factor, fibrinogen, PDZ domain protein, LIM domain protein, c-reactive protein, serum albumin, versican, collagen, elastin, keratin, kininogen-1, alpha-2-antiplasmin, clusterin, biglycan, alpha-1-antitrypsin, transthyretin, alpha-1-antichymotrypsin, glucagon, hepcidin, thymosin beta-4, haptoglobin, hemoglobin subunit alpha, caveolae-associated protein 2, alpha-2-HS-glycoprotein, chromogranin-A, vitronectin, hemopexin, epididymis secretory sperm binding protein, secretogranin-2, angiotensinogen, transgelin-2, pancreatic prohormone, neurosecretory protein VGF, ceruloplasmin, PDZ and LIM domain protein 1, multimerin-1, inter-alpha-trypsin inhibitor heavy chain H2, N-acetylmuramoyl-L-alanine amidase, histone H1.4, adhesion G-protein coupled receptor G6, mannan-binding lectin serine protease 2, prothrombin, deleted in malignant brain tumors 1 protein, desmoglein-3, calsyntenin-1, alpha-2-macroglobulin, myosin-9, sodium/potassium-transporting ATPase subunit gamma, oncoprotein-induced transcript 3 protein, serglycin, histidine-rich glycoprotein, inter-alpha-trypsin inhibitor heavy chain H5, integrin alpha-IIb, membrane-associated progesterone receptor component 1, histone H1.2, rho GDP-dissociation inhibitor 2, zinc-alpha-2-glycoprotein, talin-1, secretogranin-1, neutrophil defensin 3, cytochrome P450 2E1, gastric inhibitory polypeptide, transcription initiation factor TFIID subunit 1, integral membrane protein 2B, pigment epithelium-derived factor, voltage-dependent N-type calcium channel subunit alpha-1B, ras GTPase-activating protein nGAP, type I cytoskeletal 17, sulfhydryl oxidase 1, homeobox protein Hox-B2, transcription factor SOX-10, E3 ubiquitin-protein ligase SIAH2, decorin, secreted protein acidic and rich in cysteine (SPARC), laminin gamma 1 chain, vimentin, and nidogen-1 (NID1) or said reporter polypeptide is a polypeptide selected from the group consisting of versican, type II collagen alpha-1 chain, kininogen-1, complement C4-A, complement C4-B, complement C3, alpha-2-antiplasmin, clusterin, biglycan, elastin, fibrinogen alpha chain, alpha-1-antitrypsin, fibrinogen beta chain, type III collagen alpha-1 chain, serum amyloid A-1 protein, transthyretin, apolipoprotein A-I, apolipoprotein A-I Isoform 1, alpha-1-antichymotrypsin, glucagon, hepcidin, serum amyloid A-2 protein, thymosin beta-4, haptoglobin, hemoglobin subunit alpha, caveolae-associated protein 2, alpha-2-HS-glycoprotein, chromogranin-A, vitronectin, hemopexin, epididymis secretory sperm binding protein, zyxin, apolipoprotein secretogranin-2, angiotensinogen, c-reactive protein, serum albumin, transgelin-2, pancreatic prohormone, neurosecretory protein VGF, ceruloplasmin, PDZ and LIM domain protein 1, tubulin alpha-4A chain, multimerin-1, inter-alpha-trypsin inhibitor heavy chain H2, apolipoprotein C-I, fibrinogen gamma chain, N-acetylmuramoyl-L-alanine amidase, immunoglobulin lambda variable 3-21, histone H1.4, adhesion G-protein coupled receptor G6, immunoglobulin lambda variable 3-25, immunoglobulin lambda variable 1-51, immunoglobulin lambda variable 1-36, mannan-binding lectin serine protease 2, immunoglobulin kappa variable 3-20, immunoglobulin kappa variable 2-30, insulin-like growth factor II, apolipoprotein A-II, probable non-functional immunoglobulin kappa variable 2D-24, prothrombin, coagulation factor IX, apolipoprotein L1, deleted in malignant brain tumors 1 protein, desmoglein-3, calsyntenin-1, immunoglobulin lambda constant 3, complement C5, alpha-2-macroglobulin, myosin-9, sodium/potassium-transporting ATPase subunit gamma, immunoglobulin kappa variable 2-28, oncoprotein-induced transcript 3 protein, serglycin, coagulation factor XII, coagulation factor XIII A chain, insulin, histidine-rich glycoprotein, immunoglobulin kappa variable 3-11, immunoglobulin kappa variable 1-39, collagen alpha-1(I) chain, inter-alpha-trypsin inhibitor heavy chain H5, latent-transforming growth factor beta-binding protein 2, integrin alpha-IIb, membrane-associated progesterone receptor component 1, immunoglobulin lambda variable 6-57, immunoglobulin kappa variable 3-15, complement C1r subcomponent-like protein, histone H1.2, rho GDP-dissociation inhibitor 2, latent-transforming growth factor beta-binding protein 4, collagen alpha-1(XVIII) chain, immunoglobulin lambda variable 2-18, zinc-alpha-2-glycoprotein, talin-1, secretogranin-1, neutrophil defensin 3, cytochrome P450 2E1, gastric inhibitory polypeptide, immunoglobulin heavy variable 3-15, immunoglobulin lambda variable 2-11, transcription initiation factor TFIID subunit 1, collagen alpha-1(VII) chain, integral membrane protein 2B, pigment epithelium-derived factor, voltage-dependent N-type calcium channel subunit alpha-1B, immunoglobulin lambda variable 3-27, ras GTPase-activating protein nGAP, keratin, type I cytoskeletal 17, tubulin beta chain, sulfhydryl oxidase 1, immunoglobulin kappa variable 4-1, complement C1r subcomponent, homeobox protein Hox-B2, transcription factor SOX-10, E3 ubiquitin-protein ligase SIAH2, decorin, SPARC, type I collagen alpha-1 chain, type IV collagen alpha-1 chain, laminin gamma 1 chain, vimentin, type III collagen, type IV collagen alpha-3 chain, type VII collagen alpha-1 chain, type VI collagen alpha-1 chain, type V collagen alpha-1 chain, nidogen-1, and type VI collagen alpha-3 chain;
iv. said reporter polypeptide comprises a sequence set forth in Columns II-VI of Table A;
c. said target tissue or cell is characterized by an increased amount or activity of said mammalian protease in proximity to said target tissue or cell as compared to a non-target tissue or cell in said subject.

71-80. (canceled)

81. The method of claim 40, wherein said subject is suffering from, or is suspected of suffering from, a disease or condition characterized by an increased expression or activity of said mammalian protease in proximity to a target tissue or cell as compared to a corresponding non-target tissue or cell in said subject optionally wherein said disease or condition is a cancer or an inflammatory or autoimmune disease; optionally wherein said disease or condition is selected from:
a. the group consisting of ankylosing spondylitis (AS), arthritis (for example, and not limited to, rheumatoid arthritis (RA), juvenile idiopathic arthritis (JIA), osteoarthritis (OA), psoriatic arthritis (PsA), gout, chronic arthritis), chagas disease, chronic obstructive pulmonary disease (COPD), dermatomyositis, type 1 diabetes, endometriosis, Goodpasture syndrome, Graves' disease, Guillain-Barre syndrome (GBS), Hashimoto's disease, suppurative scab, Kawasaki disease, IgA nephropathy, idiopathic thrombocytopenic purpura, inflammatory bowel disease (IBD) (for example, and not limited to, Crohn's disease (CD), clonal disease, ulcerative colitis, collagen colitis, lymphocytic colitis, ischemic colitis, empty colitis, Behcet's syndrome, infectious colitis, indeterminate colitis, interstitial Cystitis), lupus (for example, and not limited to, systemic lupus erythematosus, discoid lupus, subacute cutaneous lupus erythematosus, cutaneous lupus erythematosus (such as chilblain lupus erythematosus), drug-induced lupus, neonatal lupus, lupus nephritis), mixed connective tissue disease, morphea, multiple sclerosis (MS), severe muscle Force disorder, narcolepsy, neuromuscular angina, pemphigus vulgaris, pernicious anemia, psoriasis, psoriatic arthritis, polymyositis, primary biliary cirrhosis, relapsing polychondritis, schizophrenia, scleroderma, Sjogren's syndrome, systemic stiffness syndrome, temporal arteritis (also known as giant cell arteritis), vasculitis, vitiligo, Wegener's granulomatosis, transplant rejection-associated immune reaction(s) (for example, and not limited to, renal transplant rejection, lung transplant rejection, liver transplant rejection), psoriasis, Wiskott-Aldrich syndrome, autoimmune lymphoproliferative syndrome, myasthenia gravis, inflammatory chronic rhinosinusitis, colitis, celiac disease, Barrett's esophagus, inflammatory gastritis, autoimmune nephritis, autoimmune hepatitis, autoimmune carditis, autoimmune encephalitis, autoimmune mediated hematological disease, asthma, atopic dermatitis, atopy, allergy, allergic rhinitis, scleroderma, bronchitis, pericarditis, the inflammatory disease is, Alzheimer's disease, Parkinson's disease, amyotrophic lateral sclerosis, inflammatory lung disease, inflammatory skin disease, atherosclerosis, myocardial infarction, stroke, gram-positive shock, gram-negative shock, sepsis, septic shock, hemorrhagic shock, anaphylactic shock, systemic inflammatory response syndrome; or
b. the group consisting of carcinoma, Hodgkin's lymphoma, and non-Hodgkin's lymphoma, diffuse large B cell lymphoma, follicular lymphoma, mantle cell lymphoma, blastoma, breast cancer, ER/PR+ breast cancer, Her2+ breast cancer, triple-negative breast cancer, colon cancer, colon cancer with malignant ascites, mucinous tumors, prostate cancer, head and neck cancer, skin cancer, melanoma, genito-urinary tract cancer, ovarian cancer, ovarian cancer with malignant ascites, peritoneal carcinomatosis, uterine serous carcinoma, endometrial cancer, cervix cancer, colorectal, uterine cancer, mesothelioma in the peritoneum, kidney cancer, Wilm's tumor, lung cancer, small-cell lung cancer, non-small cell lung cancer, gastric cancer, stomach cancer, small intestine cancer, liver cancer, hepatocarcinoma, hepatoblastoma, liposarcoma, pancreatic cancer, gall bladder cancer, cancers of the bile duct, esophageal cancer, salivary gland carcinoma, thyroid cancer, epithelial cancer, arrhenoblastoma, adenocarcinoma, sarcoma, and B-cell derived chronic lymphatic leukemia.

82-84. (canceled)

85. The method of claim 40, wherein:
a. said therapeutic agent is an anti-cancer agent;
b. said therapeutic agent is an activatable therapeutic agent optionally wherein said therapeutic agent is a non-natural, activatable therapeutic agent;
c. said therapeutic agent comprises a masking moiety (MM); optionally wherein:
i. said masking moiety (MM) is capable of being released from said therapeutic agent upon cleavage of said peptide substrate sequence by said mammalian protease;
ii. said masking moiety (MM) interferes with an interaction of said therapeutic agent, in an uncleaved state, to a target tissue or cell;
iii. said bioactivity of said therapeutic agent is capable of being enhanced upon cleavage of said peptide substrate sequence by said mammalian protease;
iv. said masking moiety is an extended recombinant polypeptide; optionally wherein the extended recombinant polypeptide is characterized in that (i) it comprises at least 100 amino acids; (ii) at least 90% of the amino acid residues of it are selected from glycine (G), alanine (A), serine (S), threonine (T), glutamate (E) and proline (P); and (iii) it comprises at least 4 different types of amino acids selected from G, A, S, T, E, and P.

86-94. (canceled)

95. A method for treating a disease or condition in a subject, comprising administering to said subject in need thereof one or more therapeutically effective doses of a therapeutic agent or a pharmaceutical composition.

96. The method of claim 95, wherein:
a. said subject is selected from the group consisting of mouse, rat, monkey, and human, optionally wherein said subject is a human;
b. said subject is determined to have a likelihood of a response to said therapeutic agent or said pharmaceutical composition; optionally wherein:
i. said likelihood of said response is 50% or higher; and/or
ii. said likelihood of said response is determined by said method;
c. said disease or condition is a cancer or an inflammatory or autoimmune disease; optionally wherein said disease or condition is selected from:
i. the group consisting of ankylosing spondylitis (AS), arthritis (for example, and not limited to, rheumatoid arthritis (RA), juvenile idiopathic arthritis (JIA), osteoarthritis (OA), psoriatic arthritis (PsA), gout, chronic arthritis), chagas disease, chronic obstructive pulmonary disease (COPD), dermatomyositis, type 1 diabetes, endometriosis, Goodpasture syndrome, Graves' disease, Guillain-Barre syndrome (GBS), Hashimoto's disease, suppurative scab, Kawasaki disease, IgA nephropathy, idiopathic thrombocytopenic purpura, inflammatory bowel disease (IBD) (for example, and not limited to, Crohn's disease (CD), clonal disease, ulcerative colitis, collagen colitis, lymphocytic colitis, ischemic colitis, empty colitis, Behcet's syndrome, infectious colitis, indeterminate colitis, interstitial Cystitis), lupus (for example, and not limited to, systemic lupus erythematosus, discoid lupus, subacute cutaneous lupus erythematosus, cutaneous lupus erythematosus (such as chilblain lupus erythematosus), drug-induced lupus, neonatal lupus, lupus nephritis), mixed connective tissue disease, morphea, multiple sclerosis (MS), severe muscle Force disorder, narcolepsy, neuromuscular angina, pemphigus vulgaris, pernicious anemia, psoriasis, psoriatic arthritis, polymyositis, primary biliary cirrhosis, relapsing polychondritis, schizophrenia, scleroderma, Sjogren's syndrome, systemic stiffness syndrome, temporal arteritis (also known as giant cell arteritis), vasculitis, vitiligo, Wegener's granulomatosis, transplant rejection-associated immune reaction(s) (for example, and not limited to, renal transplant rejection, lung transplant rejection, liver transplant rejection), psoriasis, Wiskott-Aldrich syndrome, autoimmune lymphoproliferative syndrome, myasthenia gravis, inflammatory chronic rhinosinusitis, colitis, celiac disease, Barrett's esophagus, inflammatory gastritis, autoimmune nephritis, autoimmune hepatitis, autoimmune carditis, autoimmune encephalitis, autoimmune mediated hematological disease, asthma, atopic dermatitis, atopy, allergy, allergic rhinitis, scleroderma, bronchitis, pericarditis, the inflammatory disease is, Alzheimer's disease, Parkinson's disease, amyotrophic lateral sclerosis, inflammatory lung disease, inflammatory skin disease, atherosclerosis, myocardial infarction, stroke, gram-positive shock, gram-negative shock, sepsis, septic shock, hemorrhagic shock, anaphylactic shock, systemic inflammatory response syndrome; or
ii. the group consisting of carcinoma, Hodgkin's lymphoma, and non-Hodgkin's lymphoma, diffuse large B cell lymphoma, follicular lymphoma, mantle cell lymphoma, blastoma, breast cancer, ER/PR+ breast cancer, Her2+ breast cancer, triple-negative breast cancer, colon cancer, colon cancer with malignant ascites, mucinous tumors, prostate cancer, head and neck cancer, skin cancer, melanoma, genito-urinary tract cancer, ovarian cancer, ovarian cancer with malignant ascites, peritoneal carcinomatosis, uterine serous carcinoma, endometrial cancer, cervix cancer, colorectal, uterine cancer, mesothelioma in the peritoneum, kidney cancer, Wilm's tumor, lung cancer, small-cell lung cancer, non-small cell lung cancer, gastric cancer, stomach cancer, small intestine cancer, liver cancer, hepatocarcinoma, hepatoblastoma, liposarcoma, pancreatic cancer, gall bladder cancer, cancers of the bile duct, esophageal cancer, salivary gland carcinoma, thyroid cancer, epithelial cancer, arrhenoblastoma, adenocarcinoma, sarcoma, and B-cell derived chronic lymphatic leukemia.

97-105. (canceled)

106. A kit for the practice of a method of claim 1 for assessing a likelihood of a subject being responsive to a therapeutic agent that is activatable by a mammalian protease expressed in said subject having a disease or disorder comprising a reagent for detecting the presence or amount of a proteolytic peptide product produced by action of said mammalian protease.
